United States Patent Application Publication US 2023/0067451 A1 - sequence listing, part 2

SEQ ID NO: 2 - DNA, 1300971 bp, Glycine tomentella
  misc_feature (3571)..(4207): n is a, c, g, or t
  misc_feature (16280)..(16944): n is a, c, g, or t
  misc_feature (45925)..(46009): n is a, c, g, or t
  misc_feature (74956)..(74956): n is a, c, g, or t
  misc_feature (86830)..(86958): n is a, c, g, or t
  misc_feature (88865)..(88879): n is a, c, g, or t
  misc_feature (94984)..(95158): n is a, c, g, or t
  misc_feature (95317)..(95455): n is a, c, g, or t
  misc_feature (95746)..(95755): n is a, c, g, or t
  misc_feature (96820)..(97315): n is a, c, g, or t
  misc_feature (97823)..(98745): n is a, c, g, or t
  misc_feature (118232)..(118586): n is a, c, g, or t
  misc_feature (121822)..(127528): n is a, c, g, or t
  misc_feature (129105)..(130670): n is a, c, g, or t
  misc_feature (142397)..(142406): n is a, c, g, or t
  misc_feature (143384)..(143393): n is a, c, g, or t
  misc_feature (144528)..(144712): n is a, c, g, or t
  misc_feature (145142)..(145502): n is a, c, g, or t
  misc_feature (153378)..(153387): n is a, c, g, or t
  misc_feature (153782)..(153791): n is a, c, g, or t
  misc_feature (154086)..(154095): n is a, c, g, or t
  misc_feature (159230)..(159230): n is a, c, g, or t
  misc_feature (169081)..(170328): n is a, c, g, or t
  misc_feature (171613)..(171968): n is a, c, g, or t
  misc_feature (177277)..(177905): n is a, c, g, or t
  misc_feature (201679)..(201689): n is a, c, g, or t
  misc_feature (210425)..(210434): n is a, c, g, or t
  misc_feature (211098)..(211107): n is a, c, g, or t
  misc_feature (213882)..(214242): n is a, c, g, or t
  misc_feature (214514)..(214711): n is a, c, g, or t
  misc_feature (218039)..(218266): n is a, c, g, or t
  misc_feature (218997)..(219006): n is a, c, g, or t
  misc_feature (222015)..(222598): n is a, c, g, or t
  misc_feature (224174)..(224174): n is a, c, g, or t
  misc_feature (234409)..(234434): n is a, c, g, or t
  misc_feature (238391)..(238509): n is a, c, g, or t
  misc_feature (238778)..(239625): n is a, c, g, or t
  misc_feature (242875)..(243224): n is a, c, g, or t
  misc_feature (254016)..(254495): n is a, c, g, or t
  misc_feature (278181)..(278634): n is a, c, g, or t
  misc_feature (284275)..(284288): n is a, c, g, or t
  misc_feature (284587)..(284686): n is a, c, g, or t
  misc_feature (286981)..(287361): n is a, c, g, or t
  misc_feature (288795)..(288910): n is a, c, g, or t
  misc_feature (291436)..(291445): n is a, c, g, or t
  misc_feature (292282)..(292291): n is a, c, g, or t
  misc_feature (293949)..(294099): n is a, c, g, or t
  misc_feature (300511)..(302224): n is a, c, g, or t
  misc_feature (302431)..(302451): n is a, c, g, or t
  misc_feature (303145)..(303233): n is a, c, g, or t
  misc_feature (306148)..(306148): n is a, c, g, or t
  misc_feature (307993)..(308006): n is a, c, g, or t
  misc_feature (311747)..(311747): n is a, c, g, or t
  misc_feature (317438)..(321314): n is a, c, g, or t
  misc_feature (322950)..(328184): n is a, c, g, or t
  misc_feature (333328)..(333552): n is a, c, g, or t
  misc_feature (333965)..(333974): n is a, c, g, or t
  misc_feature (335641)..(335739): n is a, c, g, or t
  misc_feature (339210)..(339291): n is a, c, g, or t
  misc_feature (340047)..(340056): n is a, c, g, or t
  misc_feature (346196)..(346197): n is a, c, g, or t
  misc_feature (348723)..(348968): n is a, c, g, or t
  misc_feature (349415)..(349424): n is a, c, g, or t
  misc_feature (362711)..(362871): n is a, c, g, or t
  misc_feature (364889)..(371493): n is a, c, g, or t
  misc_feature (373547)..(374260): n is a, c, g, or t
  misc_feature (375824)..(382906): n is a, c, g, or t
  misc_feature (397773)..(398839): n is a, c, g, or t
  misc_feature (399660)..(399802): n is a, c, g, or t
  misc_feature (400409)..(400456): n is a, c, g, or t
  misc_feature (400833)..(401051): n is a, c, g, or t
  misc_feature (422448)..(425632): n is a, c, g, or t
  misc_feature (427086)..(427877): n is a, c, g, or t
  misc_feature (440078)..(440232): n is a, c, g, or t
  misc_feature (442294)..(442303): n is a, c, g, or t
  misc_feature (444288)..(444862): n is a, c, g, or t
  misc_feature (448851)..(448856): n is a, c, g, or t
  misc_feature (450134)..(455288): n is a, c, g, or t
  misc_feature (456759)..(456835): n is a, c, g, or t
  misc_feature (457895)..(458139): n is a, c, g, or t
  misc_feature (458470)..(458470): n is a, c, g, or t
  misc_feature (467572)..(467581): n is a, c, g, or t
  misc_feature (481916)..(481916): n is a, c, g, or t
  misc_feature (482486)..(482574): n is a, c, g, or t
  misc_feature (482918)..(482927): n is a, c, g, or t
  misc_feature (486137)..(486137): n is a, c, g, or t
  misc_feature (486652)..(487918): n is a, c, g, or t
  misc_feature (492341)..(493790): n is a, c, g, or t
  misc_feature (495280)..(496685): n is a, c, g, or t
  misc_feature (501953)..(502492): n is a, c, g, or t
  misc_feature (503176)..(503187): n is a, c, g, or t
  misc_feature (522135)..(522135): n is a, c, g, or t
  misc_feature (528881)..(529455): n is a, c, g, or t
  misc_feature (531923)..(531975): n is a, c, g, or t
  misc_feature (548948)..(548984): n is a, c, g, or t
  misc_feature (556584)..(556622): n is a, c, g, or t
  misc_feature (558426)..(558441): n is a, c, g, or t
  misc_feature (558784)..(558793): n is a, c, g, or t
  misc_feature (564673)..(564702): n is a, c, g, or t
  misc_feature (565182)..(565830): n is a, c, g, or t
  misc_feature (581597)..(581789): n is a, c, g, or t
  misc_feature (583203)..(584576): n is a, c, g, or t
  misc_feature (592853)..(592975): n is a, c, g, or t
  misc_feature (593878)..(593887): n is a, c, g, or t
  misc_feature (601873)..(602481): n is a, c, g, or t
  misc_feature (613148)..(613148): n is a, c, g, or t
  misc_feature (618006)..(618183): n is a, c, g, or t
  misc_feature (618360)..(618777): n is a, c, g, or t
  misc_feature (619135)..(619135): n is a, c, g, or t
  misc_feature (620315)..(620959): n is a, c, g, or t
  misc_feature (621457)..(621466): n is a, c, g, or t
  misc_feature (623395)..(623960): n is a, c, g, or t
  misc_feature (646644)..(646838): n is a, c, g, or t
  misc_feature (650626)..(650635): n is a, c, g, or t
  misc_feature (651608)..(651624): n is a, c, g, or t
  misc_feature (654710)..(654719): n is a, c, g, or t
  misc_feature (658060)..(658808): n is a, c, g, or t
  misc_feature (661122)..(661131): n is a, c, g, or t
  misc_feature (662185)..(662194): n is a, c, g, or t
  misc_feature (676380)..(676411): n is a, c, g, or t
  misc_feature (711038)..(711058): n is a, c, g, or t
  misc_feature (711266)..(711362): n is a, c, g, or t
  misc_feature (717167)..(717218): n is a, c, g, or t
  misc_feature (720174)..(720357): n is a, c, g, or t
  misc_feature (754754)..(755944): n is a, c, g, or t
  misc_feature (756212)..(756221): n is a, c, g, or t
  misc_feature (773452)..(774525): n is a, c, g, or t
  misc_feature (780184)..(780193): n is a, c, g, or t
  misc_feature (788744)..(788744): n is a, c, g, or t
  misc_feature (795495)..(795594): n is a, c, g, or t
  misc_feature (806156)..(806214): n is a, c, g, or t
  misc_feature (807608)..(807652): n is a, c, g, or t
  misc_feature (808907)..(808932): n is a, c, g, or t
  misc_feature (818840)..(819968): n is a, c, g, or t
  misc_feature (821311)..(821330): n is a, c, g, or t
  misc_feature (821976)..(821985): n is a, c, g, or t
  misc_feature (832798)..(834756): n is a, c, g, or t
  misc_feature (842106)..(842175): n is a, c, g, or t
  misc_feature (842547)..(842556): n is a, c, g, or t
  misc_feature (843047)..(843105): n is a, c, g, or t
  misc_feature (847112)..(847121): n is a, c, g, or t
  misc_feature (847880)..(847889): n is a, c, g, or t
  misc_feature (856235)..(856244): n is a, c, g, or t
  misc_feature (857226)..(857235): n is a, c, g, or t
  misc_feature (865311)..(865320): n is a, c, g, or t
  misc_feature (866605)..(866605): n is a, c, g, or t
  misc_feature (868901)..(869062): n is a, c, g, or t
  misc_feature (874267)..(874276): n is a, c, g, or t
  misc_feature (887209)..(887728): n is a, c, g, or t
  misc_feature (892883)..(893757): n is a, c, g, or t
  misc_feature (901301)..(902318): n is a, c, g, or t
  misc_feature (904361)..(904370): n is a, c, g, or t
  misc_feature (919853)..(920083): n is a, c, g, or t
  misc_feature (923895)..(931884): n is a, c, g, or t
  misc_feature (932578)..(932912): n is a, c, g, or t
  misc_feature (961490)..(963890): n is a, c, g, or t
  misc_feature (965181)..(965200): n is a, c, g, or t
  misc_feature (965494)..(967087): n is a, c, g, or t
  misc_feature (970938)..(970947): n is a, c, g, or t
  misc_feature (981684)..(981781): n is a, c, g, or t
  misc_feature (991192)..(992866): n is a, c, g, or t
  misc_feature (993130)..(993141): n is a, c, g, or t
  misc_feature (993425)..(993547): n is a, c, g, or t
  misc_feature (1007006)..(1007006): n is a, c, g, or t
  misc_feature (1015032)..(1015162): n is a, c, g, or t
  misc_feature (1026552)..(1034288): n is a, c, g, or t
  misc_feature (1041318)..(1041358): n is a, c, g, or t
  misc_feature (1065256)..(1065261): n is a, c, g, or t
  misc_feature (1069297)..(1069735): n is a, c, g, or t
  misc_feature (1075043)..(1075052): n is a, c, g, or t
  misc_feature (1077538)..(1077547): n is a, c, g, or t
  misc_feature (1079102)..(1079111): n is a, c, g, or t
  misc_feature (1082138)..(1082138): n is a, c, g, or t
  misc_feature (1090866)..(1090949): n is a, c, g, or t
  misc_feature (1094403)..(1094412): n is a, c, g, or t
  misc_feature (1107836)..(1115603): n is a, c, g, or t
  misc_feature (1129310)..(1129342): n is a, c, g, or t
  misc_feature (1130748)..(1131059): n is a, c, g, or t
  misc_feature (1131123)..(1131193): n is a, c, g, or t
  misc_feature (1135876)..(1135885): n is a, c, g, or t
  misc_feature (1137227)..(1137236): n is a, c, g, or t
  misc_feature (1160976)..(1161780): n is a, c, g, or t
  misc_feature (1163014)..(1163321): n is a, c, g, or t
  misc_feature (1167438)..(1167438): n is a, c, g, or t
  misc_feature (1171334)..(1171334): n is a, c, g, or t
  misc_feature (1172338)..(1172338): n is a, c, g, or t
  misc_feature (1213894)..(1214040): n is a, c, g, or t
  misc_feature (1216655)..(1216741): n is a, c, g, or t
  misc_feature (1226616)..(1226647): n is a, c, g, or t
  misc_feature (1228783)..(1228839): n is a, c, g, or t
  misc_feature (1240860)..(1240996): n is a, c, g, or t
  misc_feature (1245042)..(1245051): n is a, c, g, or t
  misc_feature (1245445)..(1245454): n is a, c, g, or t
  misc_feature (1247018)..(1248075): n is a, c, g, or t
  misc_feature (1250063)..(1250400): n is a, c, g, or t
  misc_feature (1250724)..(1250808): n is a, c, g, or t
  misc_feature (1257670)..(1258040): n is a, c, g, or t
  misc_feature (1278913)..(1278922): n is a, c, g, or t
  misc_feature (1279370)..(1279379): n is a, c, g, or t
  misc_feature (1284168)..(1284580): n is a, c, g, or t
  misc_feature (1284912)..(1285398): n is a, c, g, or t
  misc_feature (1287898)..(1287996): n is a, c, g, or t
  misc_feature (1294840)..(1299354): n is a, c, g, or t
tgactcataaatattatatttatagccaggtttgttaaacctaaaagcccaactaatcttatcatgaaaagcgcattttatcttcaattccgtaactgtcgcgcgattggcgcgagtcccgcgcgactcgcgccaacttccagtgcttatggcgcgattagcgccattttgacgcgatccgcgtggacttccagatcatctggcgcgattagcgccatttgtggcgcgactcgcgctggctgcatttcttggttgcttctttttgttgcttgtttcttcatttattgtacctaaaatgcataaaaaataacaattagtaataatatttgcaaagtagtgaacttttggctaattctatcatttatttaacattttctatctaattttgactaaaaactatcctaaattcattatatattaacgacctatcaattacacgtgtcacataattgattaaaacgcatatgtaatcgattaaattgtcatttaatcgattaaagtattcaagacacattttgggtttcaacaatcgattaacccgagttgtaattgattaaatcagaaaagtgttatttcagaaaatagcttgtgtaatcgattacgaatttcagtaatcaattaaagcaacaaagcaagctttttcaaatagcctatgtaatcgattacgaataatggtaatcgattatcacaacaaggtacaaaatacattttacactatgtaatcgattacaagaaatctgtaatcgattaaaatgttcaccaaagctttccagtttcaaatacgaaccaaataatcgattaatctactgtgtaatcgattaaaatgtttatcaaagctttccagtttttaaacatgaaatgaataatcgattaatatgctatgtgatcgattaaaacagtaaaattatatttttccaaaaacattactcaattaaatcttttttcaaattgttagtagctttgatgtttcaatgaaaaacatttaagcatgttaatgaatatgtgcatgcaatgcaaggatcaaaagattggtttctcctacacttcatttgaattacaatcttcaaggcatgtgaaaagctcaaaacattcttctaagtcataggcttcattcttcatgttgttccccctatatccaataggggtcaattttgtaaaaaggtggtgagattgatgacgatgtaaatcatagaatcaaagtagggtggatgaaatggcggagtgcatttgggtttttgtgtaatcgcaaaattctccttaagctaaaaggaaaattctatagaacaattgtacgaccggcaatgttatatggagcggaatgttggtcagcatataggcaacatgagcataaaataggggtagcagaaatgagaatgttaaggtggatgtgtggttatacgaagatggataagataagaaatgaggatattcgacgaaaggtagcagtagtaccggtgagtgaaaagatgagggagcatagattgcggtagtttggacacgttatgagacgaccgctggatgctctggtaagaacaagagtgtgttaccaagagctcgacacaaagagaggtagaggtaaaccgaaacttacctggggaaaggtagttaaacaagacctaatggagtgggatatagattggcggacggtgcgttataggtcgaactggagaaaatctataagtttggtggagggttaaacccattaagatctctatgttccagtagtttcattttttagttcttttcctcttaatttcctccctcctcctttcaccatttctttttgtcttatttcccctttttcttcccctctctttttctctctctttgtcttatttacgatctatcatggggttcatctaccactaaccgcaattaacttggattaaaggtgttgatgatgataatgatgattttgtgacatttatttggcattttagttaactttaggtcttgttttgaatcaaattagctttaaattcaatttttactttgtcataggtagaattttatgttttaattatttttaatgaattttttatatttttcagcaaaaatttctcgcttaagtgctagagctctagaggcccaaaatcaccataaaagtttgggaaggagaaactgcgaaaattgaagataaaaacaaggaaaatcaagagcaagatatttttcaacgataaatcaactgaaaaatataattacttgaattaattagagatattatttgtttgtagtttattgtgattatctccttaattaaacctagctacaattttataaataggaggatagacattcattgtaacaatgtagaagtcccgagcaattcttagaattatattttaacttccacctactagacacctccattattccattagacactataggtttcattttattatttttatcagtgcaatttccttccacctaggagagaaaaagatgaaccttgttttggtttgattctatcaattcaatactttatcttgagttcattatttgtttacgtacttaatgtttttatttgattgatcatcttataaatgaatttaggaattgacttgagctttggcgaaccttgtcgaaacccgaacatgaatcaaatacttaattgagattatctctagggatagaataatcttggttaagtctcactaattgtcgaccattaatgttgattgcttgtgtcggtatatacaagggattgggtattaggcaagtagtttagaaactgcaaccatgcaggagatgggtagaatacatcaattgaggatgagcaagagagatcagtagagaatcgtgaagttacaattgatcgagtgaattccaagtccaaacctagacattcattcatcaagattgatgtcgaagtttagtatttctatctttgcttaattgttttattgtcatttcctttttattgcaatttgttttatgttatttattttatgacaatcacaaaacaaaaatacaaaaacctagttcttagttaaataattacatgaaatccctcctttattcatttgggagacgacctggatgattttcagttactacatcatgattgggttacacttgatttataagttgaatctaatgtgaaataaaatcctaacaagttttggtgtcgttatcggcaaaaaaatgaattttttatttttattttattaagaacttgtaaatatttgtaaatagattagtaaataattgtacatagttatagataattgtagatgaattttattggtatagatagattagtggataataattagaataaatagagtaggtgtacatatattaaaaattcaaataatatctaccatatattttaagattttattgatatcttactcttaattaaaattttaatttcagttttatcttgtaaatatattatctaatttattgtaattttcaatttttttgtatttactaacatatcttttgtaattatcttatctaattatcttataaatattttccgcatttaatttgtcccttcctaattttcaaataacatgtatatatctttttaacatatcttttcatattttcctttcccttnnnnnnnnnnnnnnnnnnnnnnnnnnnnnnnnnnnnnnnnnnnnnnnnnnnnnnnnnnnnnnnnnnnnnnnnnnnnnnnnnnnnnnnnnnnnnnnnnnnnnnnnnnnnnnnnnnnnnnnnnnnnnnnnnnnnnnnnnnnnnnnnnnnnnnnnnnnnnnnnnnnnnnnnnnnnnnnnnnnnnnnnnnnnnnnnnnnnnnnnnnnnnnnnnnnnnnnnnnnnnnnnnnnnnnnnnnnnnnnnnnnnnnnnnnnnnnnnnnnnnnnnnnnnnnnnnnnnnnnnnnnnnnnnnnnnnnnnnnnnnnnnnnnnnnnnnnnnnnnnnnnnnnnnnnnnnnnnnnnnnnnnnnnnnnnnnnnnnnnnnnnnnnnnnnnnnnnnnnnnnnnnnnnnnnnnnnnnnnnnnnnnnnnnnnnnnnnnnnnnnnnnnnnnnnnnnnnnnnnnnnnnnnnnnnnnnnnnnnnnnnnnnnnnnnnnnnnnnnnnnnnnnnnnnnnnnnnnnnnnnnnnnnnnnnnnnnnnnnnnnnnnnnnnnnnnnnnnnnnnnnnnnnnnnnnnnnnnnnnnnnnnnnnnnnnnnnnnnnnnnnnnnnnnnnnnnnnnnnnnnnnnnnnnnnnnnnnnnnnnnnnnnnnnnnnnnnnnntttcattataggataattattttttaattttggattttatttatcttctagtgtatcaaattcgaaaaaactaaaaataaatatatcttttattttttgttatctttttccttaattaaaatgctaagtatttcataaataaatctagatataaatagcattttattttcagattatatctcttatataatttttttttgaaatttttatttaaaatatcttttattttatgatttttattttttagtagttaggatatttatcttttatttttatatttttatattttcctttttttgttaatttttcgaagatttaataacattttatatctttaattttctatttaaactaattaaattgaccactatactcacacatattccaagttttattttattcttacatgttaggtacaagaagcaaaatgacaattgtaacttctcttgatcccaaaaccgaaaacacttttcaaaagataaatggaaaagcttcgcgtgccgagaagcaattgttcaaagaaagatcctcttcaagctcatcaattgaagcaattagaataaacaacaaaggattggcagaagtagagcaaactatagcaaacttagcaaccggtcaaggaaccaacgtgagccaacccattagaccactatacaccggggacaaccaaatcgatttcccctcatgggttgacaacaacctcaaccacaaccaatacatgggagcaagcacaaagggcccacgctcatctcacaagatttctgcaattatgtgtatcggtaagtttgccaggtattaacgatgaacatattaaacttttactcttccctttctctttgaggggaagtgtagccagttggctcaactcgcacccacatcattcactaaccacatgggaggaagtcaaagacaaattcttcaatcgacgtcaacttcaaacaagctctaacctaatcgctatttgacgcatgggagagatacaaagccctcctaaggagtttcccttgtcatggatacaacaaattcatgcaaatttcaatgttcatgaaaggaatcaccaacaattgtaggaggatgatcaatgcattggctggaggaaactacctcaataaaatcaccactcaagtgaagaccataattgaatatttgatggctagtgagagaactgtagaaacaaactggttaaatcccccaaatggtatgtatgaacttaatgctcaagataaccttttagttattcaacaaaagatgcaatttcaaatagaagcaacgactaagacaatccaacaaatcatgcaacaactccaaggggtcatttaaaagaaaccctaacaagcattcatgagcgaagaatgtaaaggagaccatcaaacatcaaaatgcatcgaggtacaaaccgaggaggttaattacaagggaagacaacaacgaccgtacaataacttccaacaaagaggtttccaaaacatacatggaatctacaaccatgcgggagacaacaaaccacaacaaagaccaactttgtgggaccaccgcaaagttggaagaagccttgaccaaactcactgaagtggtaatcaccaaccacaaaaacaccaaagccaggatcaaaagcatgaagactcaaatagggcaattggtcaaacaattgcaaagcacttcaattggttttttcgcagccaccaaggagaatccaaagggccattgcaaggctattatatccaccctagagtgtgacgtgggaagtgaagaagaagaagaggtagaagaaaacaacatactagaggaagagatgaaagcataagtcaacccttcaacccaaggtatgcaatcctcacttaatcctccattgtttgattttagcaagctaagcatccataagcaagtagatgatgagaggatggccaaatttgataaatacataaagatgctacaaggaaagaaggaggaaccacctattgaaaaactcacatgggatgtgctacatcaagtaagacccacaagacatttggaggacaagggatgttttaccattcctatcacattgggaaatatctctatcgaccacgcattacttgacttaggtgtgagttgtaacctcatgtctcattctttcttagagaagattggtcaccttaacctaaagcccaccaccatgactctacaacttttcgatggttataaaaggagcgcactatggaaagtgataaatgtgatagtaaaggtaaatcatttaacatttataactgatttttttgtcatggatataaaggaggaccaacaagttccaatcattctaagaaggtacttcatgagaaccgcttatgtaaccattgatgttcgtaaaggagttttacacacttagagagggcaagaaacaaatgttctactacattcaagacatttaacatttttccaatgaatcagctcaccaacaacaccatcgtacaacaacttgacaatccacatgtcatacatcaaactattaatgttaaagtagagcttactagaagacaacccaactttttaactcttactttttacattacattaatttaggatagtgttttagctttaagtttggagtttaaaaataaaataaaataaaaaataaaaaattatcactttgtaacatagcactaacatgaatttttgagttttgttcatcatatgcagttttattaacgatcagcttatttggaggacatgtactcgttgtccagggaggtggcgaggctgcaaaggataagagatgttaaggactcttcagccctaagtgaagccttctctacccctctcttttactttttttttttaattttgctttattagtttagttgtttagtatatttgtggttgtttaggaatatgtttattattagtaagataaggtaacacaagtgatcaagaagcatcaccattttcttgcaaacccaccgtaaaataaaactaaattttgtgcttaaattattctttgtgtcgctgacctcaaatgctaaaagtgaaaaccattgattttgcttgattgagatgtgtaatgagtttggcttgaaatattgaaagcaaataaaccaacttgtagaccttgcccgacgaatgagtgatccttgtaatgatacaaatatacatcgagagacactcttatttcacttatagtaaactttggttgaatttcttgtagattgattgcaattgtatgcattgaaatgatcaagaccatgcttgcatgtttacctttaatccaaaaggcaaaccttatatggttaatcccttgcacctaactttgagcctccatcgtttatattcttttctaatccattaaccttgaactatatgttatatttgctactacccttaacttagaggtaggagagcaaagatatagaaattgagaaaatccttaagtttgaagtggcaaaaactaatacccaagggaacaaagtgtgggtaactatgagctatcatgtgaacaaagaaaagtcaatattctctctggaaaagttgaaaaagaaaaatgtgaaaaaatagaaaaataacgaaactaaataaagatagaagcaaagtaaagaaaaaaaaatcaaaagttgaagacaagtaaagtatgaatttaatttaaaaattaggggtaccaaggattagtaagaagtgaatgaaaatccaatgaatagactaaatgttttccttcctttgagttacttttgaatatctagaaaaaaaaattccttgttagccaagccccattactagctaagaaagtccttagtgatctttgcatgcattgatgtgttgattaacttgagatgaaagtcaaagttgaactgtggtgtcttaagttgtgaattgagtgaaacacttacccaaaagtaagtcaaaagcttaagagttaaacacttattgtgaggacaagttgctatgcgattaaaattgattgtcattcttgttgcatatttctaaccttgcatttgatttggttgagctaaaaatttgaatgtcggcaccatacttaccatacttagttgattgaagcacatgaatacaaaaattgttgaataaaggggaatgcaagaagagtgtgtatgtaacttgtgattgtgtatctttagtctttagttttaattgttttttgtttttttttttttgagtcttagtttaattttgtttttgagtctttaccttttttaagtagtttttggtgttttagtagttttatttagtcttacttgaggacaaaacaaggttctaagtttggagtgttgataaacgtcaaatttatcatattttaatatacattttgtgatgtttatttgacattttagctaactttaggccttgttttgaatcaaattaactttaaattcaatttttactttatcttaggtagagttttatgttttagttatttttaatgaatttttgatagtttttcaacaaaaatttcctacttaagcgctagagctctagaggcccaaaatcaacagaaagttctggaaggagaaactgcgaaaattgaagataaaaactaggaaaatcagagcaatatatttttcaaggagaaataagctgaagaataagataattacttaaattaattagaggattattatttgtaatttcttgtgattatctcattaattaaacctaactataattctataaataagagactagacattcattgtaacagtgtaaaagtctcaagcagttcttagaattatattttagtcttcaacctattagatgcctccattattctattagacactctagatttcattttattattttatgagtgcaattccttccacctaggagagtaaatgatgaaccttgtttcgctttaattctatcaattcaatacttcatcttcaattctttatttgtttctgtacttaatgcttttatttgattggtcatcttatagatgaattcaggaattgacttgtgctttaacaagtcttgttgaaacccaaaaatgaatctagtacttaattgagattatctcttaagtctcgctaattctcgaccatttatgttgattgcttgtgtcggtatgtccaagggattggatatcaggaaagtagtttagaatctaggaccttgtgaaagctaggatagaatacataagtgaattggggatgagaaggagagatgagtagagaattccaagtccaaacctagacattcattcatcaagatcgacgacatcattcaagtctagtatttctatatttacttattattttattgttatttaatttttatttcaatttattttatgttatttatttcgtgacactcacaaaacaaaatataaaaacctagttcttagttaaataattacataaaatctttcctttattcctttgggagacaacatacacgatagttcagttactacatcatgattgggttacacttgacctataagttaaatctaacgtgaaataaaaccctaatagtagttgagaataaggttgccggagaaaaagagagagatacaaacacaaatattgtttttattacaaagtaggaaagacattaatttatattaactaatgtgtatctatgaaaataacactacaagaattgttgagatttgctacaaattttagctaccaataaatttagtagttattttaaagctaattacctatgtattagctaccaaaatgattctcctagttaaaattaaatgctttatttttagacatcttttcacacattgaaattttcataaccaaaaacacattgaaatttttgttcaagcccaacctttgctcaaaccctcaaacccaacctttgctcgaacccaaactctctctcaccctaaccctgctctgccatcacagatgttgatttcggtcactgtaggccttattttctaagtctaaacagatagaatctctcctctcatcgatctctataaaagccccaagaaaattgtgcccaagtgaagatgtgactgagccatagccatcaaagccattttaggccaccacaatttttgattctcaacctcgacactaatctctcatatacgagcttctctaccgcatacggtccattctcgcattccattcgattctcttgttttgtgagttcaaatcctaaaggtgtgctcctttaatttgaagtttgatatgttaattttgatttgttaattctgatttgttgtgcatgtgcttcttcaatttgaagttcaatctgttaattggtgagttcaattcctgctctttttaaactgattgcatctaaaaacaagaggtacactgactttttgtttaaaactaactctggattatgaataatcctgcatctgtcaataacttttgtccgactagtaatgtatcgattattttgtgtgagcatggagcattctataacctttttgattattttctatgtgtttttagggtttggtttttttaggctagaactttgaatgtttattaaaaaaaaggatatgtgtattaggcatgtattttcaacatttgaattataagagactaacttgacttgatctgtgtacatgagttcaaatatcttattattgttaagttctaatcagaagttactagtagactttaaaaattctaaataacaacataagaattagcttttgaaatagccatcctaccaatgtcacacaagaatatatacttttgattagttctttatcattcaaagttggaaactggggactaaagttggagtttcctactgtggttggtttaggtggtgtatgaaaattcatgctatatatttatgcttggttcagagctttaggagtttggacaaaacaaaatcaaagaatctaatatttcatccttttgagcagaaagtgactagtcaatgttaatagtggttgagattcattttagggagtaaaaataaaagatgattcaaattttgttactttatctatgtttaaatattgcatttgattccttatgaatgtagttttttgtgttttttttttcttgcatgcaggatgtttaaattagtgaaattcctttacattaagttatatagagtaatgaaaatttgggagaaattaaatactattatgtaattagattatttgcactcgattaaattgttatcatttataatatgttctttaaatgtataccattttgttctaaaattactataacaattgtaaaaaaactaaaatctaaaatgatatttttttttaattttttaagattgtgtttcaacatcctaactactttttaaagtttgtactttattgtaacgtgtcttataatagatgacataccatgtaatgttgtaataagtgattcttacataactgaagttgttgtcagtaataaatgtgtaacttgtttgaccgttattagagatttagaggggcaactacttctacttgccactatatataaaatatcaaagtgttcacccaacttccttaccattgtttctgtgttctactttgttctattcttaaattgaaatggtgtctaaggagattgttacagagattctcgagtggattcgagatatcaattgagaaaccttgaccctcaaattaatccttgaattttagtatattaaccctgggactgaagtattggatattcaatacctaaggactatttaggggacaaagtaatacttagaagcatcaaaatcatggtttattcaatgactatatctttaattctaccgagtctgagttttgaatagaaaattgtaagatttccattatgcaagttacccaaaatatgttgtgattcatagttatcaataccaaacagtagtggcactactgtggtgtcccacttcgtgatactagttgttgttatttcacactgcatgaggaaacctgaaatgcacctatttgttgacctttccctcttgtatttgttttagtcatttcgatcttctttgagatcatatagagtttcaagaactgagatcatccttccccccatatccttcttgcttcatttgtttgtcttggtaacaccaatgaattggacttcatgtccaaggtgatcagtagtactaatttatcatgtctagcaatctggataatcattgtacttctcaaattttggaagtagtgcacgtcagggtggacatggccaaggtaggatccagatcttgcacgttggacagtgagttgtctttgttaagatgggggacatgccaaacaaaggagaggacttcaacgctcaagtaagtacatcaattatgtgaaaatgagaatgtatatgtataagaatgagtctgtgtattggtgtgtgtatgagtgtcctcataggttagacgaaacctggtacttatagagtgagggggggctttgggtccttggatgtcggggttgttacagtggtgtaacaaccctttgcagataattattatcctgtagataatgactaacagataattgcagattgtagataattaggcttacaaataatgtataccttatagataattcgtagcttgtagataatatggtggcttgtagataattaggtacctggcacttaataaggaggttgcaacattatcaataatattcaaataagggagcgtttgtgataacctgttcgacccaatagcccaagtgttgagggggagatgcttgtgctcttgtagcaaaactgacatggagggttgacatgtgtactggagcaccatgtaagtggccatgtgtattttgtgctcctcgaacagtacaatcatatagattcttttggattctgaaagttatacctctttagagttaaggcaagggaccaattttgactcttaacttgaattaaagtgcatagttaatggcaaggacttccctcctccattgataagatgatccaacaacctcctagtaataaaagcaagcatacaatttcaagtgccaatggaataccattgagaaaccacagtttttgggttgaatttgtgattagtttgttactttgattaactaattatatgaaatgattgttgtaagatgataatatttgaagattgagtgaatactgcactatttgcatattttatgaaatattttagcttttctaatttctttactcattatatttttcattggcaacattataatactatgcttgagttctattatgttttcaatattatgtaacctgtatttgtgtttataactattgtgttaactcttgagttagcttaaacaaatatttatagtttcagtcactctatgtactttcacctaggatagtaaaatacaattattagttttgtagctatatattatttgtttgaatgttgatgcatgttagtggcaacccagatgcaatgattttgactataacaactgaactttattcatgctgattctttgttaaaaatatgactatatgatcctttctgttctgtatattttccagaatacaaatgtataacaccgaagtgctatgtggttgctgtttgatcactctaactctggaattcaagggagtcaatggagaatgacaccttgaagcagaagatcacagagatacaccaatggaagtggggtgtgtgctctgtgtaattgaaagagggaaagctagagtgtgtgtgtgtacctttctccatggaggacgtccctatttataactttgagaacactgacctgagttagttgagtagtgagcctcatccattatctgtatgtggagattgactaatagtgggtttagtggctatagggttgttatctccactacctttggttatctgaataactgataagtggcagttataatatttgtcatatattcctatcctttgatggttaagatattaggtatttgaattaataaaataaatgagccttttatttttggccaagggaaattaccataacactttcaatgctccattacaagaaatgtcttaacaatgtaatttatcttttccaacctgtttacgcattcattgctcttaagctactatattttgtttcatgttgaattaggtcttcttaacacattagagctaaaaatagacttgatagcacataaaatagacttgacacctagaaggtcacattccttcaatggaaggatacaattttattttatttttgtcttgtttcagttcctgatagttaagttgccttgttttgttgatgtaaaatatctttttgtataaagattatttttaaattggttttgcttatttgtatattattttttggaaattcaaaccttaacattctctaaattgaagattatgttccttgtttcctctattacgtgtttgggaattgagaccataatttttttttaacttcaaaggctatgatcaaaagaaaaacaaattgttttggaatttccaaatattatactaattgtaattactatatttatatgttctcttatatctcactacttttaagttctagcattaattacagtgttgggcctacacatacttttgccaccagttctgaaatatgaaattatatccttgttcagtctaatagtacttttgctttcaggtactcactttttcttataatttagttttaacaataaacatgcatatggatttttgtagtcatgcttttaccttagtttcttattcagaattgacttgtatattatgtttggcataatatacaagttgtttttcaattatccaccatagtggataattgaaaattcgtaataggtactttattattgtatctctcagcatttttatctaagaatgtcattgtagtatttccaattgttctcaatacctaatttggatgataatacacctaagttaggttgtgtgcttcgagaactaaagcgaatttctgccaaagttttgttagattaataagaaacatacaataatatgatgtgaatttgacaatcttggataggataggaccccaaccctatatagtataaagtgaggtcaaacatgtagttattgcatgtagatactaaaaaagtaactatatattaatatttagcaaccataagacctcatagaagttgaattatacgaataaaaaggtaattatatatcaatattctacattgacaactaacacatattattgtacgtgattcctgttctaggtcattccatgttattagtttgcaaattaggattgttattttttttttttttcttgggccaattgttggttactaactataatggtttttatacagtaattaatacaatatatgaacaatatgcactatcctttgtcttgatttgtgtgttctgtgaacaatagtcactatcctttgtgttgatttgtgttctataaacaatattcactaaggtagctgctattttcacatggaactatttgtttgggccttttggtgaactgttgatgtgtctttgtccttctacattagaccaatttcttatgattatgcataaaagacattgtcagtagattattacattgatatttaaattttgtagaagaaaaatgagaacatatactaatttatgattttttatatatatcattttaggagtcatatgacaccataatgttggaaaagtatggaaaagactcttcaaagcatccattggttgattcaacagtgtgggcagatgtgttagattcgaagaagagacgagtttttggaactatgactacttcatcttcaaatgtcataagtccctcccacacttcaatttctacacaagaagttattaaggaagttgtaaatgttgtcatgacttgttttattcataattgtttgatgcctctattggagctcattatatctttctttggtggctcccaaactagagtagctaaggaggatcatgaagactcataatgaatgttggtgttctttggcaatatagtgttaagcccaattggacctttaggcacaagattgttgatttagagaaagattgtttgatactacattaactttattttgcaaaaaaactaaacctttagaactttattcatttgttctgttgttactttctaatttccatatgttgcaaaaataatggctttgcaagattaggaatatggttcttctttatcctacatgtttttatatatatatatatatatatatatatatatatatannnnnnnnnnnnnnnnnnnnnnnnnnnnnnnnnnnnnnnnnnnnnnnnnnnnnnnnnnnnnnnnnnnnnnnnnnnnnnnnnnnnnnnnnnnnnnnnnnnnnnnnnnnnnnnnnnnnnnnnnnnnnnnnnnnnnnnnnnnnnnnnnnnnnnnnnnnnnnnnnnnnnnnnnnnnnnnnnnnnnnnnnnnnnnnnnnnnnnnnnnnnnnnnnnnnnnnnnnnnnnnnnnnnnnnnnnnnnnnnnnnnnnnnnnnnnnnnnnnnnnnnnnnnnnnnnnnnnnnnnnnnnnnnnnnnnnnnnnnnnnnnnnnnnnnnnnnnnnnnnnnnnnnnnnnnnnnnnnnnnnnnnnnnnnnnnnnnnnnnnnnnnnnnnnnnnnnnnnnnnnnnnnnnnnnnnnnnnnnnnnnnnnnnnnnnnnnnnnnnnnnnnnnnnnnnnnnnnnnnnnnnnnnnnnnnnnnnnnnnnnnnnnnnnnnnnnnnnnnnnnnnnnnnnnnnnnnnnnnnnnnnnnnnnnnnnnnnnnnnnnnnnnnnnnnnnnnnnnnnnnnnnnnnnnnnnnnnnnnnnnnnnnnnnnnnnnnnnnnnnnnnnnnnnnnnnnnnnnnnnnnnnnnnnnnnnnnnnnnnnnnnnnnnnnnnnnnnnnnnnnnnnnnnnnnnnnnnnnnnnnnnnaaatatttatcatttatgttagcatttattggtatgtttggataaacttttccataaacatgtataggaaaagaaaaaaaagaacaaaaataaataaatttctccaaaagataaacttttcttatgcataaattcaataagttaatatgataaaacttttacaaatttaattagcttatgtatatgctaattttttttatcagttatgtatatgctttagtttatgttatttcattttttttcttatttttttataagtatttatagagaagtttatccaaacaaactctattcctttaagattttaatcttatgtacttattttttcttcaatcacattcatgtatattattatatactccataatatttgtattgattcaaatcaatcatttattattttttatatttattaacatacataaatgataattaaaaatatattcaattcaataataatattatatattattatacaccaattaataagtcacattaatggtatataccaattgattgtaatattatcttttggattttaataagtcacacacacatatgcataaaaacgattttaatcagtcacattcatgtatattattatatactaattaataaatacctatgtgatattttcattgattgcttatgaaactcccaaccccacacaacaccatgaagccaaaccaaaacccagcccattttcacacctctatcttcccattgtcacttattattttcctatcttcataactgcaattcatgttcctctaggcatcttacaaactcatggggcacacacgttttttttttttttggctttatgcaacagatgaagacaatgtccatcttgcatatcatttataagtttgtaggtttcaactttatgataccataacactcactttaactgcaatgacatatcatcttctcttgttttttctgcttcatccatctcaacactctcatttttttaacttgcattttgtgtgtttttgttcagtacatttgaatacaactcagatgagtattccaatgtcacaatgttccctccacttgtcacccactttagcatcctccttcctttctcttgtttccttttccttccttttctttattctccattcacaatctttgcatttattttttgtcatatttttttctatatttttgtttgcttaattggcactaccaatgcacctaaacaacttcttataagatcatcatacacactctcacttcactcaacactcaaaacaaaaaccttgaagcctgttaatttcttaccaaaatggaaaacttttttgtgccatttttgagaaaaaacaccaacccattaatcaccactactagttgcactggctcatctttgtcaaaccaaaccagccttgtacaacaaaacatatatcctcaaaatttcccttacaatactagtgaaaaacttgactttcttgaacaaccttatttcattcctttgtatccctttccaacaggacaaattagctttcctaaacaaccttatggaatgccaaattcggaacttcaaggttcgagggcatgcatgaccaaagctacaagggagagatggagacaagtaagacaaaggagtaaaaattctactctcgttgctcctaattcagttctagaagggacaacaagggaacaatttgttcctaatggagggtcaaatgtgaggatcatagtcaaacaacacaaagcaaccaatttttttaacgccccaaatgggaaggtgattggttctcgacaaatatgctttcctttatgcattaaggccttgttcattgatttcattgttttctaaaattttcattcacaatttgtctcttgagaaattaatagtgtttgaagaaaataaatgaagaggatgaaaagatatctcaattgttttattttggaaataattttcagaacttgatcaattttgattgaaaaataattattgagtaaggagtaattatttcaaaaaatagtttttaaaacaaaaatgttagaagggaattaaacatgcctatatgtaggattttttcttttgagtcttttaatatattttttaactattctcattgtctaattgtagaagctagaagaaattttgacaaagaagttgaataagagtgatgttggcatcctgggccgcattgtgctcccaaaggtaaggttttctgattttcttcaaataaatgtttggttttctttctctttatataccttccaaggaaagatgaaacattgaagtaaatatgccctattattggctcatcttgttaagcgaaacttgatttgtgatccaggctgcccaataactattgtttcctaacatatcgattttagcacaaaaatagaagaaaaagtaaagaaaaatggtcatattttcagtcataaacatatttgtgcctataatttgcagaaaaacaaaccattgccgaaatggaatttttcagttttcaacataaataattttaaattctttctataacatctttttattaattcttttactataattattagatattttttaaaaattaagatattaaatacatttattcttcaattgtatgacaaattgaaatcagttttaatgttcatacctttttaccttttgcttgtatccaagttaataatacatatatgttaaatagagagaggctgaggataagcttccgacattatggaacaaggaaggaatcaatattgtactaaaggatgtatattctgagattgaatggagcatcaaatacaagtaaaggaattctctgtaatttatacatgtttctttattgggtatttttttttttgtttttcaagacatagaaagtataaggtgttattgcacaggtactggtctaataacaaaagcagaatgtatattctccataatacaggtaaaattcaatatcttgtttgttgtcaactatagtactacaattgcaattttttattttggcatcataaacaattttttttcaatccaatcttacaggggattttattaaccattataaacttcaaacgggagattttataaccctttacaaggacgagttggaaaatctggttagttttgctttcgttatacataatttggtgaacatttattattaaccaaattttggaggggtgggggaagaaaggttacacaatgtgctcataaaagtttctactaacattgcatgttactatcttttaaggtatatttagagaaaaaccgattgatggagaatttatatagtttgatctttgtatttttccttattttgatgttttttgcacatcatttcaacccctttagattgcatggttctttcttactagatatgacaaaggaaatatgtgcctaaagattctaacttaagtgaatctacgatgttgtgtctgattttatttacttctatttaatatataacttaaaataattaatttacactatgatttgtacaatgttatgatatacctatatgatgtgaaccatttttatgtgaggaaccagtatgtgtcggctggaaaggatcaacaaaatctagacgaatctaagtcctcgtcaaacataggaatggcgcatgaaacagatgcatatttagcttgcatgacagaggaacttagccataagaggaaagcagaagttgtcaacaaccttttgaacaatgttgaggaagaggcaccaaatcaagcaaatcaattacatcaattcatgccaatgaacaatattgttgaggagggggcatcaaaccaagcaattcaagaagccacaccagcaacacccctcaatgttgatcaacaaaacaaagttcttgatgatgatgatattatctatggtggccttgacaatattgtcgaatttgaaaataattatcaaatttggtagtcaaactatcaatgaaatatttaagatttgtgttggatatgttctctgacatgcaaacttgtattcatgcatgtcatgtcctgcttatgttcaatggtcttttgggatggtggagagaaaatgaaaggggagacaaatttgacattcgaattgaaagaaaagtagtaaaaaaattcaaattttcttttcaatagtcaattttttatctcttttttttctagtatttttaattaaagaaaaagaaaatatattattatgcatattttatgtttatacatatgtaaaaacataaaaatcttcaattaaaatttatttaatatcataaaagtggtttcaacactatgtcatgaagattttatactattaaaaaactttatgtaaatatactcattcaaacattaaattacaatttacttgttatttgtattacttgtgcaaaatcttataaaatttaactaaataaaaaacatgattagatgtttttatttttatatattttaaaaattaaatatataaaatgttatatcatatagcattaaatgatttgaaattaattcaaaatttagctgcttcacatgtaaatgttagtcattcatttaatagataattaatgtaaaattaattcctaccatacaaaagcattcaactaactctagctatttgttcaatggacaaagttgcaaggaactagttcatggattaaaacctaagtctcacttttcttttgctttcatcatctttcaatggcacatatatttgggctttgataaagcacatgcatggtgcatctttttgttgttcctttgtttattctttctttaaatatgctttaaaagagggaacaaaattaagaaatagtttttgtttcaattcgtttgcaatagaagtcataggattcccttgttgagggccttagagcattaatttctagtctcaaagtgggagcttcttcaattttggagactctcagtaaatggttgtcattgccaaatgcctagaaaatctcaccacattttcatctcagtaacatgcatcacatccacgataagaaaaaacctaatattttctcataatttaaatatcttctcatatactgtgaatttaaatttagtctaattttttatttaaaatttaaaattaaaattatatttaaaatattttaaaaattatttatattttaattatttttttacaagaaattattagtaaccaaatttttgctggaaatattttttgtctataatactggcatcactaagatttcaataatgatttattaaaaattatatttaaattgctttgtcataattgacatgttatttaataatgaatgtgttagaattttgcaaaaactattttataccacacacacatacacatatacactaacacccatttgttttttcgaaagaataagttagcaagttataattataaattttttaaaatacactcaaagtataacgttgttgggatgctaatatataattaagtgttaatttatatattagttgtttagtcttggagtgtcaacgttgttgggatgttaggatttacttttgatgtttacctgccatagtcttcattaaaaaacatgcattctctaagcttttaaggtggtgataataatagtcaactaaatatttccttttgagataagttgataggaacacaaaattcactccctaaatgggaaaaggttgatcttacaaggagaaagttgttgaagattgagttggagcatggagataggttgaaacaaaagtgtgacttctatgcaagcaatttgtaagaatactttgaaagaatgttttaattattaagcttttagtgggaaaattaatttgctcattatgcgatcgattgaaggctatttggaaacacttagaaggggtgggtgttgtcgacatcaaccatggctttatacggtaaagtttgactttgcaaaggataaagagatcgtgattggaaatgaaccatgaataatatttgattgctacctcgtagttcgactttggtgtgtagactttgtcccctatgatgtgatgatccatagcatgttggtatggataaaattacgtgtctacggatagagtatactatggtgaaagtggcctcttagtgcttgcttttctagtaattggtaggcacttgttaaagtggaattcacaaccatggttgtgtcaagaggcaagtttgctattatatgtgaggagataaacttgagtcaactaatggtgggggtgagtttggtttcatgtaatcattagctcaatgtaaagtacgaaggcctccatttaacctacaaatgttgcagtctctatggtcatattactatgaattccctaagaagaagaatgatcaagtggcattgtcaaagacctccaaataatagctgtgagggagaataaatacgaaagatataggtaaacatgcaacttttaatttggttcatgttaaaccacgtaaataaaggccataatggtctctatggtgattggttgatagtaactaagggcaaaaaaaggcacgtaaatccattatacataattttgggggcaataaatccaagatggatgtagggcaaaaaatcatagaccaatacaactatgttcttagtgttcaataatgtagatatgaggagagattttggtggataaaaggaaacgtatgtgttcacgcctttaatgatgattgtacgaaggatcattgtaattcaagaaaattgtgaaaaagaaaaaaaaaatagaggggaaccaaaagtggcattgcaacttgcaattccagtaagtacgtaattctccgatcatttaaggtcatcctaaagtaactgcaaacacaaaagaattaaatgtggaaacaaacaaggacaaaggctaattagagttaaccaagtttgttccatcatgaacatgaaattaaaactatatgaatgtcacagttttaccatcgaatagattgagtccccaaacctccaaatacaatcattgaggaggtcacatctatgaagatttgtgaggtatcttttgcagctatacaaggtctaagtgatgtcaacaagattggtatgcatggagatatgctaccttccatgtaaccatcataatgaggttcatgttctattatattactactatttttattttgaatttgattagttttaaaatatttctatactttcttggaatatggcttttcatatgcgagagcttcttgctaggtacaaacctataatgatatttttgtatgaaactcactttttttttcttaatcacaaaattttagggataacgaaggttattcattggttggggttgaggtcaaggaagcacgaaaccattttatggaggcattagggttgtatgacaaaataatagtgcattctaaattcaactaatggatattatgcctcattataatgaccaagcctaaaaaaaagagtttaaatttacaatattatgttgaaaaaacgttagcgacgtaattagcaacgaaattggcgatggcgacggctagttcctggcgcgaatagcaccagtagcaccagaagtggcgtggttagcaccagaagtacgccagaaagccaattttctctgaaatctggcgcggttagcgcaaagtggcgcgattagtgctaggacgcgatctgggccactataaaaggccatttcatgcgttttctggccaaaactcacctttcttcttcctctgagtgttttccaccattgttgagtgttgcgaaacggcaagtgtacctttcgtttcaagtaatagagtgagtaagtagagtattgtatccacagggattgaatcctaattttatcgtaactaacaatctgagaaattggaagaaaataatgtgtttaaagaaaatattgttgtgttgtggaattatgcaaattagataacagaaattaacaagaatttaaaagcaaatttgaattgattgtaatgcagttgagagaaataattatggttagaacacaatcccctttgatccctacctctttcacttgataggttatcaatttcaattacttctgattactcagaggatatatctttccaaatctagttaaatcctaattccttagcaatttaaccctttaacccaatccaaaatcctaattccttagcgattcctatcaagctaagcatttaaaagaatatatcataaagttttgcaatcatacatccctatccctaggcaatgtaaaaactgttatcttacttatgtcagaaattagaatcccaacatccctattgcgaaccctaaccctcagaacttaaatagaatggccaattctaagaaagaatataacaatgaagaacagagtaaaacaaagcaatcataataatctcatattaataccaatcaaattacaaggagttcacattggttcttggccctaaccacaataaagaaggttagccagacatgttcatgtctaacctcaagaaatacaaagacagcagaagcattaatctgtcttcaaattctggctttgatcttctcttcactgtatttctatgtgtatttctgtgtgttcttcttttggcctcctaagtccctatttataattccatgtccatatagttaattagggtaactaaactcttctgctgttttatttttgtgacaaatctttcttggttctgcttctttctttcttttttactctgaaataaaatagtaataaaatgagataaaaataaataaataaataaataaacttacctaattctaacctatattgctaattattgattgaattataactaaattaaccctaaaaactaagatgtgctagcagcatatcaaataattcccagatttagacattgttgtcctcagcaacaaacagaatctcaagatggaagcaaggatcaacaatcaaacatatatcacatttaacaatcttagaatcacaatgctgagtataatcaaatttcacatcaaagtctccacaacacttttcaattccattaactgtaagagtcttacttgagcatttctcacaaggatatatctgtttcgctcaacgctcaagtgtataaaggttcatatcatcactcaattcaacacagtcatagcactaccataagcttgatcatattctcaagttccataagataagaaacataaatgcatgcacaactgatcaaaaggtctttataggattgtaacttggcctggcttaagggtatgaatgttttggatagtagctgggttaagattggatttagatagaatttcccaagtccactcaaacacaatatcaattatttcattctcatgtctccttgtccacatctataaatattatcataaacaccattttttttttacaaagcaattggaatatcagactgattcttttccattgaactattgtcttcttgggtatctttgtctttcctcttacttcttcttaactttctatggacatttaactttgctatttttcaatatctagtggtcttagttctaattctttcttcttccaatcttaagtagggtagtcaaggtatatggtctaaatgtttaggtatatgaatgaaaaggcttaggctcaaagggggtagcaatggaaaaattgaaggtgagtcaatttggccctggcttaaaagaataaactaccttaatcatatcagaatatacatgcatccagagaaatagagcaagttctagagtactatcaaagtgaggtctctcttagaaaaataattctgtatgggctcaatcctcacaggctacagtctcaagctagactctgttaacttcatatcaagcatcatttactacttcaacatgggcatcaacataccaacaatcacaattccaatcatgtttcttgcaattcatgtaatatttcatttcactcatgcttcctaacagagacatccaattcatcactgattccacaattctaattctgagataaataagatatacttctaacctttattgaaacaattaactaaaaatttaaaactaatgactaaaatttaaaactactaaaacttaaaaaattttctgttagcaatcttttgtctcttgaatgtgattcttcaaataatgcatatgcgcccattcccagatttagaaaattgttgtccccagcaataactaaaaaggattatgtgctactaaatactcaatcacgtatgcattatttgagaaatcacaaccagaacgaaacattaatccaaatagaacacactcaaaaacaatttaataataaaacaactaacctaaattcatcaagcattcaactaacctaaaagtaatgtaaagatactgaaaattaaaaacaagaaaaataaaattaaaacaaaaataaatggtcctggtctgtcactttgctgccagatgcagtagtacttttcttcttgtctttctcaatctgttcaccctgaaactcagaaaagcatccactaaatattgcaatgcaaaactaatatggtactagacttggaaattcccagatttaaatccattcatatcacaaaatgacgcactcggatttaattctcagatttaaaaccagaacatagggattcaaatgaaaattttgtggacaaccttttttttttttagatatcctttgtctcttgtatgtgattcttcaaataatgcatatgcgcccattcccagatttagaaaattgttgtccccaacaataaactaacagaaactttatatccacacatgtatgcgttatttgaagaatcatagacataggtgaaacatcaatctgagcataaaccaaaacaagtataaatcagcaaaaatagaaaagtaaagataaaaaaaaaagatagatggtgaaagtccaatcaatactcctaaaactaaaacaattatgactcaacaatattaaaataaattaaaaaactcaaaattcttgggttgcctcccaattagcgcttgtttaacgtcacgagcctgacccaccactcttttaatcatcaagtgaatttagtggaatagaaactgtattcctatccacttggcctccaaagtaaagcttcacccggcatctgttaactttaaaagacctgtcattgtctaaaggagagatttctactattccataaggacaaatctttcgcaccaagaatggaccagaccaacagggttttaacttacctggaaaaaactttatgcgaaatttggagagcaatacctgttgtcccgactcaaattctttttggcgaattttattgttatgccacttcttggtcttctccttataggtcctagcattctcacctgcagctatcggtgttttgaatgcaatctgataagcccaaggtgcatcatcaagctttttggcccaatccttcctagatgttcccaccgtctcttctagaattcttttcagctcaacttttggtgctccaactgggatatcttcttctttcttatcaagcacttccattactacctcagcagcttcttgtatggtctcttggctttgaatttccagctcctttttaagtttttcttcctttgtttgacctgcacaaattacattatctagaacatctagcctagaacaatcatgtttgtcagatgaatttttcatagtatcaaaaacattaaaaacaacagattcattatccatcctaagttctaatttgccctgctctacatcaattaaagccctagctgtagctaaaaatgatctacctaaaagaagaggtatttcactttcaccatccatatctaagactataaagtctgcaggaaaaataaatttatcaactttaaccagaacatcttcaatgactcctgtaggccttctcagtgagcgatctgcaagctgtagagaaaggtgggtttcaattcagaaataccaagggacttacaaactgataatgacattaaatttatgcttgccccaaggtcacataatgctcttaccacattaatattccctattgcaatagggatattgaaacttcctaggtcttttagcttttgtggaagcttcctctgtatgatagcactgcactcttcagtaagtgcaatagtttcacagtcctgcagtttatattttctagacaacagttctttcataaattttgcataattaggcatgctagctaatgcttcagcaaatggaatattaatatgcaatttcttaaacatgtctaagaacctggcaaactgttgcttttgaatctgttcttcgactgcactggatagggaggtttctcaaaacgagaaaaatcccattatttctttggaggtgcagaatttttttcttctctttctttatttgaaggttcttctacctctatttctgcagcaaccgtggtattctcctcctcatcttctttattgcttaccttaggcttttcctgagggttgattacctttccactcctagtagtgattgcattggcatgttcccttggatttactatggtgtgactagggaactgcccttgaggcctttcagatatttgctttgccaattgaccaatttggttctcaagattccggatggaagcatcttgatttctatgatgagctctagtctcattgatgaatgcatttgtggtctggatatgatcattggtaatctttgttaattgcagcaaggctttctctaattaagatggctcttgaggtggaatagatggaggttgtagataatggttagacttgtaatctaaacctcctccctgaattttactctgataattatttcccatagcatagttttgatttctctggtaattctactggggtctctgatcgttccacacgccattcacctgcactgggtcagctcctaccaatataggacactcattagattcgtgctcaccttggcaatattcacagctaacaggtggcattctgctggatgagacttgagctgcagagacttgaagtttgtctatcttttcagttaatttggccagccactgggccaatattttctgctctgctagcatggcatgactgctccccaattgaatgacttctctctttggctggaccataatgctttcattctcattacgggctagagaattaattagctcataagtctgagctactgtcttagatcttattgagccaccagctgcaacattaacaatcattcatgattcaggagtcataccattaaagaaaatatgtacttgcttacccacaggcatgtcatactgtagacacctcctaatcagctcttgaaacctgttccaagctgcacatagagtctctcttccattctgagtgaaattggtgatttcattcaccaacctattatacttctccatagaaaagtattgggagaaaaattttgcaactaattcttcccaagtagtgatgctatttgagctttgtctgtctaaccatctgagtgcttttcccttaacagcaaagggaataatctcaatctaatagcatcatctgacaccccttgatgtctgatggtatcacaaattctaagaaatctgtcaatgaagttatgggggtcttcatcatcttccccaccaaattgactgtgttccaccaatgtgatcaatgacggattaatgtcaaaattattggcttgaattggtggtctgacaatgctagggtttggtctagtgaacaatggagcaagaatatcctccatcagttcatcttccgattttggctgattatttgtgccttcagccatttctaattctaattctgatttaggaattgaatcaaaatcaaaattttctgcttctcttcgtctttgtcttactagtttcctgttctttctagcagccctttctatctcaggatcgtactggagatgatcaggattaactgtaccttgcataaactcagagaagcaatttagtaacaaaagggtttccaatcacaaagattaaagttattctaaaattagttaattcaatccccggcaacggcgccaaaaacttgttgcgaaacggcaagtgtgccgttcgtttcaagtaatagagtgagtaagtagagtatcgtatccacagggattgaatcctaattttatcgtaactaacaacctgagaaattggaagaaaataatgtgtttaaagaaagtattgttgtgttgtggaattatgcaaattaaataacagaaattaacaagaatttaaaattttgaattgattgtaatgcagttgagagaaataattgtggttagaacaaaatcccctttgatccctacctctttcacttgattggttatcaatttcaattacttctgattactcagaggatatatctttccaaatctagttaaatcctaattccttagcaatttaaccctttaacccaatccaaaatcctaattccttagcgattcctatcaagctaagcatttaaaagaatatatcataaagttctgcaatcatacatccctatccctaggcaatgtaaaaactgttattttactcatgtcagaaattagaatcccaacatccctattgcgaaccctaaccctcagaacttaaatagaatggccaattctaaaaaagaatataacaatgaagaacagagtaaaacaaagcaatcataataatctcatattaataccaatcaaattacagaggagttcacattggttcttggtcctaaccacaataaagaaggttagccagacatgttcatgtctaacctcaagaaatacaaagacagcaaaagcattaatctatcttcaaattctggctttgatcttctctccactgtatttctatgtatatttctgtgtgttcttcttttggcctcctaagtccctatttataattccatgtccatatagttaattagggtaactaaacccttctgttgttttatttttgtgacaaatctttcttggttctgcttctttccttctttttgactctgaaataaaatagtaataaaatgagataaaaataaataaataaataaacttacctaattctaacctatattgctaattattgattgaattataactaaattaaccctaaaaactaagatgtgctagcagcatatcattgagcttgggaagctccgtacccactcaaccattgaccaaaacacttcacacccaacatgaaacttgaaggaaatcatcctatgagctagattccatcatcagttttccctaaaaaccatcaaacggagagatcgttttatctagggaactttccgaagtttcaatttcaaagggaaaggaggcgttttaagaacatccaagcttggagaagttgtcctctagccttccttgtcgatttggagataagaaactcaaattctatcgattatttaagaatttgttcttgaggtgaatagtgacccatttgagttagagctgaatttaggcttgggtcctttggaaaagtatgcttaggaggtcgttgattacttgtgtgcctttgtatagggcgtgacatcgagggtgtcagtggcggagaccacagttcatggattgaacagcagagcacggctttaccaagtaagttctttgtttttaggagtgtttcccactgcttgagttccaccatactccgagggagtgatggttgcatacatgattcatatgcattgaattggatgttacagctttcctcaggataatatgtatgcatgtttttgtgctttgtgtttggttgcctttcgaatagatcttctggccagttagataaatatggacctccctaggagtagagcgcaactcctagtcggttggtcactaaagggtgtatgatcccttaacaccagagataggtggtcccgtcgcggttgaagcctattctcggaggtgtcatatacgtgcatccatttgtaaaggggtagctcccgatgggatggcacgggtgtgagtttcgatctcacactgaggactgagagtcctgatgctgatgatgatgcatctttggatggcgtagtatcgcagatacacattagaactagagaatgtttatgtgttgttgtgagagccaggaggcctgacattgtgatgcctttgatgttatgtatcatggaagtgggccagggggaggagaagcctccaagaaccctgagcttattgagattgtatctcaccccgtgtgtggagattatattttgcagatgatacatctggcaaagatgatgggtcccagggcgggaggccctagtagggacaaactctatgtagttgcttggcagtattttgagagcattgtggctcactattttatgtttatgatgtattttgtacccctgcgagggaagatgtgagtgtacacatattttggatcttgtatggatgtgatgtacagacgctatatgttttgtaccctcttgtgaggatgtgatctgtgagatcatggcacagggtgcctattcttttgtatattcacagtggtggtttttggtgatgtatatatgtatatactcatatagacatatgtggcttttgattctcctgttgtatctgtatggatatattttatctttacctgctattctttatgttatttggatcgtaaaggcttgttgtggtatcgtggcattcgtttatgtatcgtggatatgtaccatacataatgaataaggaaatatgattttgaatggaaatgacgatgacgtcatgttttttattgaaaacgcttccgttgtttttacttaatggattttaaattaattactgcattaatctaattaagtaattgttaatacaccggatgcatacgggggtgttacactcattgtattattttctcgatttgtttaggtaatttctccttatcatatatgttaggaatttatgcgagtccaatttacttagttagagttcaattattgagactactgaagaagacaaatgaatttacaaattatgcatgtttggattacaaatctcaaatataagtttgaattaaaattatgttgtaaattcaagtttgataaaaaaaaaaacataatgtaatttctttagatttttttgttgaaaaatatgttcataaaataaaatttatttaaataatactaattaagagtacttttatttgaggttactcttcaaaaacactatcaacggaaaactaatttttcaaaagtaactcaagttagtattgcatgtaagttgaaaattactttgagtaacaacaaaacaaaataacaaaatgactaaatgtcacttttgatctattatgttttagtatttttattttattttggtatattttaaatttttcttttggattcttaatgttttttagagttttattttgtatgttaagttttaaaagttttatttttatcttttatattttttaaaattttattttgatcatttctttcttttttgttaaaaatgttagtgtcctatcaatgttttaaaatttgacggaaaacattgcatataagtaaaataaataatttaaaataatggtgactaaaataattcattatttcaaaatttaaaatattgatggaacaataatatttaaaaaaaaaacgaaaaaatgactaaaataaaactttcaaaaatattaaagactaaaattattttaaaacttcatgtatcaaaatgaaaaacactaaaatataatgataaaaataacatttaacataataaaatggcaaactaagtttagtgagaaaaaagtgtgttagagaggcctcaatggctatttaaacatagcctcattaatcacaatataaaaagaaatgggcgtttcaatcttccgtaagacaattttccacttcccatcaagtgtgtaagaacgaactttccggtaagagcaattttccatgtcaacacaaagctggggttttcggttccgcatgtgaacgcatttaaacataactaccaccattatgagctttttgtaagacaccccccctcccttccaaaaatatactggatttagttctatgattattgttgacctcaaacgtgtatgctaagaaaaaataaaataaaaaactatatccaaacaattagaggtgtaattaggctgagccatccatcggatacctataacatggcatggcatgtttaaggcctaatccgactattttagaaaaaaggcatactcaaagctttttaaaagagctttttagctaaatacgtcagatcataacctttttaaaaaattattaagattaacatattgtcctaattagcaataatattatttttaatataattgttattattattattattattattatgatatgatatataatattataattattgtaatgaaatcacaaaattattttagtggattgatgatttgaataatttaaatatttagaataagttgatttctatatgtatggatgagtaataaaaatagaagttttttttcttgatagtactggaaagattttgataacatgtcacatatttgtaggccaatttttatattctatgtgacttaaaattgtcataatgttttaaatggatatctttgactttgttaaataaataaataataaataagaatataatatttcacattctaatacttcaaagcataataattttataattatacaataattttttatattttttaatataaaacagacctccaaatatgttacataaatcaggtcatatttatataaaagtcaaatttagacttaaaaatagatttgtgacatataacaatcttaaacttttaaaaatacaaaatagatcacgtcacacctaaggtgtgacttgacctaatccatttttatccttattgagattccttgatattataaactccacaaacactgttttcccacctattcatgattagcgtatgaggactattaaaaggaacaaacaaaagggtgaacggacatgtcactattattgtgtaattagttgcacacataaaccataataggttgattatgatgcttgagcagtaaacgttactatctatctttggtacccctatcttccacaccacacctactcaccttccctctcatctctataaattcatcaatccatgccatcttcatttcataccagagaatcatagtccttacaaattgtggcaaaaatggaatctagagggtccatatcgatgaagcgtttgctgcttctgcatttgtctgctctatgtgtttcacaggattttgatttctactactttgttcagcaggctagattgtgtcttcaatctgtgtaaccttgttataataaggtcattcattctctaaagtaagctttttatttgtttttcttctaataaccaagtgttaaaataaaataaaaactacgtactccattgtccagaggtttctcgctatatgaagataaaggggagggatattatacgcagtcttatccttgcatatataaagaggttgtttccatattagaacacatgaccattaaatcaccaaaacacaactttatcattgtactagacaagactggcttaaggataaaattactaaaatttgagttctaaacctatgaagatttgctattagttttttaaagtaaaaaagtcagacatgttatctaaaagacctcacacataactcttttctttaatttaaaaaagtttttctcaatttttattttaaacctggattgaccctgtttgttttggatattacatttgcagtggccaggatcgtactgtgacacacagaatagttgttgctacccaacaactggaagcctgctgcagattttggcattcatggtttgtggcctaattacaaagatggttcatacccatctaattgtgactcgagcaatccttttcaacaatctcaggtactttattttacaccaattgcactaatgttacattctttaaaatttgctttcattggcccgagtttgaccattctcatccttccaattcacaaatatattttttgataatcattttattgttacggaacatccaccaattttatcgttaattcatcttgattgaaaaatctgaccaatcacctttaattgaattcttccatcccaatcatattttttcgattgggtcaactacttatctgtccaagttcccaaatataattctactagttgcataatgtgttaaagaaaattttcaatatacaaataaataatacatatatttcaaggattactttttcattatatactttatttcaccaaattgctataggcaacgaaaatagtgagtgatggtgaaattgtagtttggagtccttagacagttgcaaatttagtactaattaatagctaggtaactacaattgtaatttgaaactttgctgcacttgcttgcttctgttgaatcaagattacttctctgtcccgtaacccattacttaatcaatgtgtaaagctaaataaataatatgcttcatccaattaaaaattccttccctttttgttccctcacaaaacaatcgtttcctatctaagcgttatactttttgtcccctttttatgcgtcattctacaaacttttatccttgaattaagtattcgtggcacaagcagagaaaaggttatagacaaaaatgagtttcgatgataatagggaaccaaaagtgcaataaagcttaaaattaaatagttgaaatggttagacttgacactattatgttgtttcttaaacaggaagaaaaataaagaaacattagaaaccacaatccacactgcatataagatagttaacctcaaaacatcgtctttttgttactcatatggatcacagcacatgtcgaagtcttcatgtcatatctgagccagaataactgtctttagacaactttttcagtctcagcaatctacttgtactcttgtcccagatttgcataattattggatccatacttccatagacttaattaccatatggtgcaacttctcattttggattagcatagtaatataaaaaccgtggtacttcgagggaagagaattgtgttacactgattggacgatccacttctaaactatcatggcaatgttacctcttgaaatggatcagtacttcatcaacaacatactctttcagcatcacttgcatcttcctagcatttaaatttcgttcaatttggaagattatgaccatccttaaaaaaatttatgttagcagaatgtggccaactcaaaggaaactctgtgttcctgttcacaaagaaagaagccaaatgctccatatcagttaaggttagagcagcttgaatatgttaaaaataatgcaattgaatgcactcacccaacaaagcctcttttttctttgcacttgcaactactgatatattcattagagtatcttttgaatatattgtcaaagtgcttagccaattgtgggatatcctctaaaggcaatatgtcccatatcttcaaaacctgaatatatcttgatgctttgactatttctattaattaaatgacatgaaggctttcaaccttaaattgtttcaaaatctgcgataaattctgacaatacaaatctgcggtaaaccttttaggtctccatccactagaaagtcttttcaaaaggtttatagcctccttcttaattgcttcagattgcagtcttttgaatgacctgaggaatttgtcactgaaatgcacctgcagatgtgtacattggcagcagtattgagaatagatccagcacatacaggatcaataacaaattagtgagaacataaagtgatttcaactcataacaaaaaatatcagggattaatttcaaatatacactattttaatgagttataaaaaattgattatctgagggagagcttttgctgccttctgaactagtgtttaggagttcaaatatttacttttagaataaacagctagtgagtagctaatacctcattaaaaaatagttccatgagaaaaaaaataaaaatacagcatgcctaacaacacctaagaataatctccaaagttaataaaagaacaaggataaaattacgtctagtatccatataccttccacaatgcatttttaaaatggacactaattgtatcaagcaaatcatcaaattgatctgactcttcctccacattcaaagtagctttttccatttcgtcgtcttggtcaacattaaagaaacatttccggctcttagcatcaagcacaatagccttccaaacatttttgttgcttgtaagggctctttcatttcccaaaatccataaactatgcctagaaaatatggaaccagaagcagcttttcacttaatatgatactctaaagcaaataagactttaagaaattgaaaaatttagagtgagatctacctagcccttgtaagagcaacattagtcctatgcggagaggaaatgaattcaagtgatgatctgttgttggttcttacagttgataagataataacattgacattaaatccatcacggctttcatacatctgtccaagtttctcttggatagcagtaacttggccagcatagggagacactataccattactgagtttctccttcaaggtcaaccatgcaccaacaagcaaaaagcagctgtctataaggattcagatatcacgtgtacttcatgagttataatcatttgtcaaattctagtcataattattttaagatgcacctttctgttctttccttttgactaaactgagttagtaaatatacaagtgaaaataacaaagtttatctttttccacacttggtgaatcacacgattaactttagttattgctaccagaaccagtagaatttcctacctaaaacttataaccaagcctaacaatttagtagacctctaatttttttcctaagtactgaactttgaaagaaaatgcaggcaaaagatgtcacatgttctaaaaggaagtgttattgtcatctaaggtccagcaccatgaacagaaagagaagcaaaaagcaaaaataaataaataaattagaaaatactgctgaaaatttgtataagtgaacaaacctttgtgcaaattcttcactattgtcattacagctgctacctcagccatatttttatagcttcttccagcataatcaaaattttcttttcctctaactatatttataaaagaataaggaccaaacattggccccggaaggtagtgcttcctatagtcatttctttcaacattttgtgcatcctgaattttgttaaaatagaaatattaatttggaaatgaacttatttgtggatgcatcctatattgcatattgagaaggtactttgggtgacccaatgaactcaacctctcaaataagcttctcccaaaaccagcttcataacaaaccttgaacacacaaaaagaacaagaagaaataaaaatataaattagcaatgcaaaaggattggggatgaaatattctcctaaaaacaccaactaataaatgcttgatagtggctacatacattacttctaaccatggatggcagttggcattcatcgccaacaagaatggcatggcttattcctcgaagtaacataggtgttattgattcacaatcttttaactgtgcagcttcatctatcaccaaaatgtttagtggcttcatgtataaagagtgcagcttgtatgaaccagaaactgtggaaaatatcaatgttgtgtttcgaaacaaaactctcccagagagtaattattaacatgtttgatcgacatcaatccaagacgtgaattttttcacagttcttaaagcatttagacattcgtttctcttcatgtacaactggtatgcagcaccatcaaatgaccatgaagcaggcatctccggtaattcttcataagagaaaagttgttgcaaatcttcacaaaaaaaattattttgaaacagcaagtcttgaaacgatttaagtgcctctcatttaaacacaccaaattaagtaagtgacacataggtacgcgtgtaaataagatagaaatacatagctgttccactcactcttcccatttttcaagtcattccctacaattacaaacctatgataatagaaaacacaattttgaagaagatcaatcattgatttaagacaagaactcaaacaagtagatctgcaaaacattctgttagctgttgcaccctatgatccaaatatatatctttaatatcttcaatttttagcctctcattgttccctatcaatagcaaatctcccattgaacagaacaaattaccagattctttactatgtgactctttcactaaggctgctacgccagaagccacttctttgatggcaacatttgtgagggcacatacaaggactctatatttcattttcaatagagcaaaaagtagtgtggtcaaagtttttgtctttccagttcctgggggacaccatatgagcttcacagcagagttgtggttgcaattgaggccagatagacatgtagaaattgcgttattctgggattcattaagctctgataataacctttgatatgaagggtcacccactcaccccttaaaagtatcaaccagagagccacaactatcatattcctcaacctgttttccagaacatacattaatcagttagaacactaatttcaaaatcaaggagtttaaatttacatataacgcactttctattagtaatttagtatatgattagaatttgagaatcaaatgatctggttggtgtggttagtttggtgtctgaatgtcataaaaaaatagtagttttacattctataactataacaatacaataacagataatttgcatttagcaaattaatcatgattgctgtcagcaccaacttagcatatacaattttaagatgctgaattaaaagtataataccacaacatcaaattaagatttaaacatttttttaatccttaagaatatggtattattttattaaaattagttcctacttaaattctattcatttttgtccttagaaattataaaaattgtacgcttagtccttcattaggggcaaaaaatatactattcttaaaaattaaataaaggcctaaattaaatttcttacctcatttgtggtgcataagatcttctctactaacttcaaattacagggcccatgaaatgcatcccaaattcatctattaagggttacatttgtcaagaaaacaagaaatagtgttttatgccttaattctgtccagtcaatatcctctgatgtcttaacttctatggaaacagacattatgcgaccctgaaactcattcttttttgttcttagaactgatacaaaattcgacctccttccaaccctttgcaattcttctacagtttgtggtttataatcagccaaaagtaaaacatcatcaggcatagtgttgtatggttctgcatgatgaccaaacctacttttttagcaattaatttccaacttacacactttttctacctcatagttcttctgtagaccaatcacttctgcataagatgctttgtataggatctccacgcttgagcatagctgtgctcgagtttcttccaataaagagttgaaaaaagatccaagttattgaccagtggactggaatgatagtgcaatcttctccacctgaaaatcgaaggtaaaaaaatgtgcataaagtataatttgttgaggaggagaacattaaattttacttgaataaatactcatttttgtcactaaaaatgcgaagcgatgacgaattaatccctggaaaatttaaaaattcaaatttaatcccaaaatatgtaaaaaaaaacaacaaatatgttgcactttttgcacatttgaagattaaggatgagtttatttaaacttaaaaagacaactttaaaataagcatgtttttaagaagcatgtaagatttgcttcttaaaattaatagaaaattattttttaaaacaaaaacagtttagacaaacactaaaaaattaaaaaactactcattttattaaaaataaacatttttttaacaaataaatttaaacaaaatggtcctaaatttaaatttttcatgttttatcgtctaacaatttcaggaaccaaaatggataggtaggcaattgtaggtcatgatcttacacttataatatgtaaaaattgaaataagaaagaaacgaagtttttttttttttttttttttcccaaacggtgaaacaagctaagcatggctatgcaaaagcacttactttggattaagttaaaaaggtcatatgaaaagaagaacacatgacagaccctctagtgagtgcgtgttgtcttgtgcacgtgtgtgtatcaaactaagcattaaaatacttaagatatatacattttggaaagaaaaaaagtgttcaatgatgtttcacataagataaaaatcagtaatagtgccaatagctagtaaccttgttcttgtataaatcttcatttagaatgtcttcaatggacaaagaaataatcgaatccatgaaaccacaatcattagagttttcctcattagttgaagtctcacattccatcattctttgttagctcagtttccttagcagaaaaaaaaaatcacaaaacctcagttttcttcttacatgaacgcatgcatgcaatgcatatataactaagtgatcagaaacatactgagagtgagactctttgaaattttaactgtaatgatcacttgtatagaaagtagtaagaaatcagcatgctataataataattgaaagtctgagattaaaagcctcacacaataaatgcttggtttcaagaggtagcctttggcataaaaaaagaacaacaaaaacgtattttggttttccctacactcttctcatctaagaatttctctttatgttctctttactcattttttggtacttcttacctctttactctttgtttactcattgattaagaaagtaaaagggcaaagtttttctcttagttctttaaccaatatctcaaggacacattagttagcatttatcttttttattctataaactaatgttgtggaaaaaactgtttaacttccttaacttttttattaacatggaaaagaattttcacatcttaaaagggatggtatataaaaaacagttaaataaataaaagaaattttttaattaaactaactcgccctaaagtacatttaatgatatatttgttcataaatttatttaataacttaaatacactttgaattaaataaagagagaacattctctttaaagaacccttattcatttactctcaactctcaagtagtaatagttaactttaagtagtaaactaggcttcttgtttttcagttgttggcttttatgttttgtttgtgtgtgtagtaaataagcatcacccatttactatcggaacgtgtcaagttttcaaacccacaaggtgatcataaatttctttatatttatttttttccacacacaagaatatacaattttggtgattaatctataaaattatttttcctataaaatttaatatatgtaaagtttagtaacctaaacttttgaaaaaccgaagctatcatctgtaacttcaaaaaaacaaaacgaagatttttgcaaacgaagagaaaacagacaatacataactgatttaaaaaccacatttgcaaacagacacagcagcaaccctcattcagttagaaaggaaagcaagataagatcagatgcacagttttatatttgtttgtctctactattaaaattacgtttaaatcttgataactcgtcaagttttactaattttcaacaaaattacaagtattgttcacggtcaactttgactcttataaaagcttatccccaaagctttaacaacccaagtatgtttttatcaagtcacatatggttctagtaacaaatcattagatttgctgaagtttaggggtgcacatagactatcttacaacttataaacgaatatgaaactaaagcacaaatgtctttttctctcaagatttttaaggtgttttgaaagctatataacttagagaaatttacaagagaagagagcttgaaggaggtaaataatatgcaattcaaaagcatcacatgagcttttcaaatcctctcgtatttataggcttcttcaacaagtaaatgttgtccctaaatggtcttcaactacgccaactcttgtgtatgaagaaggtatttgttggaagcaattaacgcgagcattaaatgcgagtaaactccaatatgataaagagctttgttttatgttccttgagcaacactcctacagctggcttcagtagtcaaattatcttttgatcagagtaggtctgcacaataatagtacgtctttttaagtgaaaagagagtttaaatttgattattccctttctttctttcttcacttcgacggatcctagaaaggacattcagacattccacacaagtaggaattatgaacagagagcattaactcattcttaaatgcttctcgtttctagcttatgtttgttagtatttgttctattggatgcaaatacaatactttcttctatcagcatataagacataactgtttaaacttagtatttgtttacatctaatcaaaataattgaggtcttgatctcatcttatgactcaacaactttattaatttctttttgtaaaaatttaacacaatgaaaaaattattttcattctacattgtagattgacaccccctatatcaacgaattgtatatacatggaaactttttttttgttgtgtagttaatttgaaatataagttacctttttaaaaagatagcttttaataataactgaattaaataccatacaaaataaaataacaatgaaattttttggtatgcaaaatggaaactagtttttattatgtatttatacacaatataagtgtgtttacatcaatgaaaatgacatgtgtgcgacagagttgtgaaggagactgagaatgggtgcactagagaggaagaaaagggtgcaagaaagggagaatgatagaaggtggaaggatttctaaaagaaagagggcaggaagggtgggggaatttagtcttttcacaaataaaagaagttaggtatgaaactagcaaaaagggatatgagaataaggatgacaaaatatattcaaatcttaggagtacttataaaaaaatctgcaaatggaaagaaataaatacttgactcctttccaaccaaaaaaaaaaaaaaaaannnnnnnnnnnnnnnnnnnnnnnnnnnnnnnnnnnnnnnnnnnnnnnnnnnnnnnnnnnnnnnnnnnnnnnnnnnnnnnnnnnnntccacaagctgtattatgcacttggtccttctttttttccttttcttttttccctacaacattgtgtgtgttggctggttggttggaagcaagagatgcatcgaccctcgagcttcaacgacaaaacgcaatccttgcaaccatagaacacaatccctcttcaacctccgacattgatatgacactactttgcacttcgaaccaaatacctaaaacataacccgactatgtttatgtaatcgctcaaaggcccttgtaagttgtaaccaaagaaatcgtcttattcaacctccggtgaacattgtgaattttctcccttcttttgagaatcctaacctgttggtttaaccccttcctaatttgattcaagatagagaaacagtgttaaaaggcaagggtaagaaaggaataaaaagggtgtaattataaatgtgtcaaaggagaggaatgtgtaatttttagaaacctctcctcagatttgtttgtgtaatttactcatctacacttatattaaatatgtccagccactatttttatgttagcaggtgttaacaatttatgcaaattaaatggattcattgttctttttttctctcttttattttcttcttctcattttttactttcgatcttctgactgtgcttagcacgataactgtccaagaaactgtactttttttctccgttatatcaacttacatcaactttttcatcctgtactgtttttttctctctctatgttctatatttttataataaaaaaataggtttttcttttttaactgcccgtgcaaaaggacggggcaagtggtctagtaattttaatatctactctgttaaataattcactccaagttaaagtccaggttagtaaaaaattcctggtactactgtcacgttcaagattgtaattaatgacgcagatcaacctcttcaatccaagacatgcaattcatatgcaattacaccctccatttgtttaagtctaacaacacattaggacattattaaaaacgcaataaggcacctgaaaatttgtgattgtgacatacgaattgagacaccttgtcaccttgtaatatttaatcttcattttatactaaaatttgaataactaaccatcaaaatagtttatcaaatcaatagtttttattttattttaacaaatttgatgacaaatgatatgagacacctgtcaacttgtaatatttaatcttcattttatactcaaatttgaataactaatcatcaacatagtttatcaaatcaatagttttttattttattttcacaaatttgatggttagttggttaataagatttacatatttttatttgtttcacatcatccatgataattgaaatgattttgaggaagtcatgatattttattcacttaagatccgtttaaaatgactgaaaatgaaaaaaagaaaagaaaaaaaacacacataataatatatttttatttgatttaagataaaattaaacaaaaatcagaagaaaaattaacttaaaaaaattaaattaaaatttttcactcctttcatcttttcctccaattcaaactccaaaaaaaattcctcccttattttcttttctgtcacctctgtcaaacaaaggattaggcatgcttcatgagtcaagtcaagagccaatggaaaactgataatatataatattaattacatttgatacacgttagtaggaaacaatatactgattaatataatcttagttataattaacatgcatcctcttaaaaaaagtcataattaacacatgattactcatgcacttctagtaaagtaaacactagtcaggtatttgcatactagcttcctgtactggaagttgtctctttctctattaaattaacttacacaactcactcctccaccaaagaagtcaacgtattcgtaaactggagacagattttccgcaacgtatataaaatagcctagagcatctctaacaaacaaattcatcaaagtctttcttctatttcttaataaaaaaatttacttctttataatattatattacattttttactttatacagtccagtcaaatttttactctaacaaaagaattcactcaaatttctgagttaacccacaaatattgagtgacaaaaaaaatattgcactgctttttttcttttgtaaagtcacgtctgttcatttatttaataaaatataaacaaataggcccaatctacagtaagaaaaattagtgctgcgactcacaactctcttttgaaatgagacctatcatgttgttcttcaatggtaagagaaaattttcaccaaatttctattatactataatcatttggcggatactaaaaaatttataataatctatttattatgttcaatcaactaaaataacttttttaatatacaaaataacttatatacatcacagaataatgtgtcattacattatgttgactattaatactataatcgagtacgaaaattaattgacataaaattattataatttaattatagttctcaaatttgaattttagatatattatattaaatatttgaaaaaaaattatcatttataataattttatctgatttgaatataattgtttttcatgcataaaagaaaaaaaatatttatataatcacttagagtttagtaattcataaaaatgcaaatctttccgaccactttcaaaaaaggcaaaactaagttgagaacgaaatttcaaggaaagttacttgctcagaaaacaaacaagaaattcacctaactatccaactcactcaaccaaagaagtcaaaattcttcgtcaacggtaaatattttccacaacctatatgaatactttgtatgggccaggtttcttgaaagttgaaacatagaagaggttgactctttcattatcaataaaattatgtcagttcaattatcatacatacatatgcataatatatgtgtagtttgatgaatgaaatttattaatttgtatctaataaatatctttacatacacaatagtttgtccaaattattaatgtcctatttacattaaattaattgtcaagaataatttaaaataaaattataaaatcccccatctcattattataatctctattattatatcaagtaatcaaagaccttgccaaattaattaactatatttaacaaaataaatatgatagtgaaattaagaacagtactttttttaaaattaaaattaataaaatgatggattagatggttgtttggacgtgcatatttattctgtcattatatctgtataaccacttagatcagtgcattcatgaaaatgcatgtcttgagaacgaaagctcaatgccattataactgcgtagtaccaattagcttagctcgttcacaaaaagacctagtctagtagcttgagagagaaatttcaataacattcgtacctgatgtggatacgtgcgtgcaatttgcttaagcattttatataattatttttttaagaaaaaaactatttattttatgtaaaaacagtttcgataaacacataaaaaatcataaaattaattattttatttaaaaaaaacttatttaaataaataaacttaagcaaactagtccatcgatcaaaacatatgatgagttaaatgttcattgacttggaatattttggacaatacaaagagaaggaaagagtgtgaaacttttgtcttcaatggagttaaatggcgtgtaagacctacttattggaataattaagcttaggttcattttaattagtggacatgactttgtacgttattgtccatttgtcaacagttatataaaatctggctagttgtctataattaagcaataagcattgctggtccacatgttatttttactttctctctcctttttatttttttcaaaggtggaaagtatgggtgttaatctagtttacagatatattaaaactgtccgatcgtcgccaagtgctaacggttggataatttgcatttttttaaatgcatttcatttttgtttttaaaaaatttaaacattttattctatttttttttcttaactccttttttactaaaaaaatcgtgcattgctcgggttgtaacgctagtttgttattatataagtgaaaggaagcataatagaaatagacttaagcaagatgaacatgtttctcttcccttcctatgtgttactacttctcttcctagtcctaaacctaccacacaccactcactctgatgacattgccatttattggggttcaaacgatggtgagggtaacttagcagaaacatgtgcaactggtttatactcctttgtaaacatagcattccttgcacattttggaaatggtcaagtccctcaagtgatccttggaaggcactgtgacccttttgggggaaactgttccttacttggaagggacatcagaaactgccaaaagcaaggaatcaaagtgatgctatccattggaggtccaagcatgagttactctcttgtttcctctgaggatgctaagagtgtttctgattatatatggaacaatttcttaggtggtggtggtaactcatcatcatcttcaagtccactaggagatgttatattagatggcatagattttggactaggggggtcccttatgacaaaacattgggaagaccttgcacataatcttaagtcacatagaagaaatgtgtacttaagtgcagcacctcaatgcatttttcctgatagtgcacttggcaaagcacttgagactggactttttgactatgtttggatacaattctacaacaatcctctatgtcagtacaatgaaggtaatgcttctaaccttcttaatgcatggaagcaatggacaacttcattgaaatcagggaaaattttcttggggttgccagcttctccaacagcatctataggcggatatgttccacccgatttgttgatttctcggatcctgagtacggtaaaaacgtcttctaactatggagggattatgctttggtcaaggctttttgataaagagagtggatatagtaaaaggattttggaaaatagtgtttgcctacagaaaagagaaactgaatgtggaaggcacaagaatggttttgttgaacgtttaggctacatggctaaagagggttttgtagcttctgaaagcaagagcattgacatgcagtgttgtgaggttatttgtaggaacaattgttcctgtgaggcttatgcttctctaaattttgtcaataatactggatgccagttttggggtaaaggaacaaagtttattaaagattctggtggaaattccaaacgagtttactttgtcaaacataaaggtatgtccattccaatttcccttcatgaaaggtggttatgctgttttccatgttcttatctgcaatgtatgtaaatatacataggttattcataacatttcatatttccctatcattccgttatgctatatatcagaattctcataagtgaagcaacactcgattgatgtggccaaagatcacagatctcaaagaataagagaggagcactataaaagtagctcattgtgtgattgattgattgatttgaaaaagatacatgagactgtatagggtgctctatttatagagctaattcgtaacaaactaatattcctaattagttactcttgcatatattctgaagctttggttggtctagcactagcatttaacagtagattatgaatgacatagagaaattagaaagccttcacactgaatataggacatacaagaacaagatgctaattgtttgaaattgtaaaatcaatttcataagttgcaaattatcttcttgtaagttgcagtgaacaagctgtggaaatggatagtcattggtgttggagcagctgttgcagtacttgtgtcctgctacttattctatgttttgaggagaaagtgcaaagaagaaggtaattacttaaaagaaattgttgtatggtacggtatggtatattttttcattacatataacttgaaatgtaatttcattgatttcatcagtggacagaaaaatgaagcgaaaggaactgttagttgaggttggaggtaatgcaatgggaaattatggcaaagccaaagggtctaacaaagagggaaagacaatcaatgagattgaagtattcagtttggaaaatatcattgttgcaacacacaatttctcccctgataataagctaggagagggtggttttggtcctgtctataaggtaaatgtcacaaacttgaattgaaactatattgataagtattttgatatgatgataatttcagggaacattaattgatggacaagaaattgcaataaaaagactttctaaaagttcaggccaaggcctagtagagttcaagaatgaagctaagattatggccaaacttcagcacactaatcttgtgaggcttttggggttctgcatcgacagagatgaaagaatacttgtatatgaatacatgtctaacaagagcttagatcattatttattcggtaggtcatcttctatatcctaataaacaaggtagtgattattagactagctagaactagacaaaacagaacatctcagatttatttcatgtttgatgcataatataagtagaacaatacatgataaaagggaaaatgcggtacacagttctaataaaaagggtgaaataaagaaaataaaaaacagaagtctcataccattcttttcttatgtcaaatgctacataaagatatgatgagttcatgttcttactaatgtgtttcttacttataaacagatgcaagtagaaagaatgagctagaatggaataaacgccttaaaatcattgaaggcactgctcaaggacttgtgtatttgcacagatattcaagactaaaggtgatacatagggatttgaaggcaagcaatatattgcttgatgaagaaatgaatccaagaatctctgactttggcttagctagaatatttggattgaaaggatctgaagaaaacaccaatagagttgttggaacatagtaagtatagacaacaaatctgatagagcaccagaaaatattgtgattatatctatctatcatatctattaaataaggaactcgtagcttttacaagtaacatgataaacactcgaggattcaatccttgtccagttttacccaattatacaattcttcttgctaggatacaatttttctagtaaagttcatgattctattctatcacagtccacttaaatattttatgtttgacttttagtttcctttaatactactaatagctaaactttctttttttcttaagtggttacatgtctccagaatatgcaatcaatggtgttgtctcggtcaaaacagatgtatacagctttggtgtgctgctacttgagattattagtgggatgaagaacaatagttgcatccactcaaatcatccattcaatctcatagcacatgtaagtttcaaaaacaaccaattcatcaaagtcaatgttcttttatttgatgtacaatggaagcaacgagaatcgaacctaagtccttgtgcatctatcacaaccccccaccgctggaccgaccctagtggttccatcaaatttaagtttaattgcacattttctcactcaactattatcattttgcaaatatcaatcaattttttttcatgtttttcaatttttgcatattttaccatcacgttggtaattacacgatgtcgtttcacaaaaattagtaacgaaacgacattaactttttttagtgatgcgtcagcatcagtaaaatgtacgaaaattgaaattttaggtgataaaatttgtgaaatgatgatagctagttagattataaaatgtgttgttaagcctaaaatttaatgttcaactcaaactaattaaaataatgtctctggatgttggcatttttttaggcctggcagctatggaaccaagggagagctctagagttgatggatccatcactaaatgaatcattcagttctgatgaagtagaaagatgcattcagattggactcttatgcgtacaagatcatgcaatagaaagacctaccatagaagacgttgttactttcctatcaaatgataccatccaacttggtaaaccaaagcagccagcattcttcatgtatgtggttgctggagagtcaggatgtcctaataatagcaaacaagaaaattattcactaaatcatttatcaatctccactgcttatgggagataaatattccttctccaacagggtggcatgacacctatgttgatgttgtagcattatggccatatcaggcttcttccattttatcgataagaattgaacatgagaagatttataatactcacacattctattcaattaactgttctaactatatcgcacctatttgggatataaacagggtcggtcttgaaaattctttggcccagggtgaagtgaaaaaaatgggtcctaacacattttttttggaatacaaataatattaaaattaagggatagaaaaaatgggttcttaacacacaaattttttgaaatacaaataatattaaaactaagggatggaaaaaatggacccttaacacacaaattttttgaaatacaaataatattaaaactaatggatgaaaaaaatgagcctctaacacacaaaaaatggatccctaacatacaaattttttgaaatacaaataatattaaaactaacagatggaaaaaatgggcccctaacacataaaatttttgaaatacaaataatattaaaactaagggatggaaaaaatgggcctctaatacacaaattttttgaaatacaaataatattaaaattaagaaatagaaaaaatgggcccctaacacataaaatgaacccctaacataggttttttttattatttttttaataaaaattttacttaaattaccggtgcaaaaatttttggaccctgagcggacgccctgctcgccctgccccagggccgggcctggatataaattagttaaaaaatttattttatgaaagtgtatttacttaaaaaaatcacacttataatttttttctttgaaggccaacttatttatgtaaacataaataatatatttatatcttagtgttactatatactagtattacgttaatttttacaacactgttttaaaatattaaacatgttgacttgcataaagaattaagcctataaatattgaagaataaatttatgttaatttagagacattattacaaacagttttttaattaaattgtcattaaagttatactagaccataaaaataaacttatatcacaaaaataagttagctagattcaactattataaagtctaacctacttccacttgatatatgctttgagtagcaatgctttcaattttcatacttcatatgttgttttacatagagtttttctttcactggcctattagtcaatcagttttatttgggatcagttagccctatcttaaacctcatatgttgtaagtttttaggtaagctaacacgttaagtctgcttttaaaaatatcaaatcaagcttttaaaaaaattatcacaattagcaggccaaacttacttgagtttggaattttttaaaataggataaccccatttagggaaaagtcaatccatataaagaaataagccattaagttggctaacacattaacttagtcttttaaaattccaaatcaagcttaataaaagtctatataataggtaataatagaatacatttgagatttgaatttttaaattggccagatatatttaagtaaaacattattcaaccccaacctatatctttcattatataaaccaaaaaaacactattttttcattatttgcgatcaaaaatcaatatcgggcctgcgtctgggccatatttgcaggagcaatggcccaggacacataactagaagtgcccaaaataaaatataggtatgtagtaaaaaaaaatctatattattttcaaaaaaaaaaaagattgaaattactcgtttgttttctccctttttattgaaaaccgatgttacgaggaatacgttaacatcggtttttcagatttttaacaaaaccaatgttaagaggaatacgttaacatcggtttccaaagttttttaacaaaatcgatgttaacgtgtttgtgttaacatcggttttacatgtttttaagaaaatcgatgttaacaggaacacgttaacatcgatttttatatgaaaaccgatgttgttgttattataagacctgaccctcaaattaaacatccttcttcactctcgcacctatcatatctctgactcccattgtcgcttttcactgcgcctacctgaatcgctctcattgtcagtgtctggtcactctcacggcacttccattgtcggtgtcgggttccattgtcgatgtcgaggctagggatggcaaaatgggctagcccacccaaaatgggccggactggcccaccccacataaaaaaacgggtcgggccgggctggcccaattttacaaagttggctaaaaatcctggcctacctcactttaaagtgggttagtgggctagcgaaccagcccaccagcccacttaaaaaattaaaaaaataataaaaaaagagtttcttgtttatatgttttcaatatttacaattattttggtgtcaatgtatatatatacaatttagcaaggataatcacttaaaattgacttttaaagagtcttgcatatgatttttaaagattattagaggaggtaaaattttcaactatataagaatcatgtaatcatgcattcatgctcattcacaattgtggcatgttccaaccaaggcaacatacaagcaagctagatttggtgttaatagaataaatcatttacaatggacaatcaatagtttcagaaagcaaaatcatcatgtagtatttgtaacaccccgtatgcattcggtgtattaacctattattatatcagaatagcgcagcaaatatcgtatatcataaaaatggaagcttcaaacaaaatgacgtcatcaagcgtcattaacaaaatcaactgtacattatatacatatgtgggaaattcttacaatatacaaggtataatagtctcaaaactgtacaaatatcccatcagggtacaaaatacaggcataatcaaaatcttgagccaacaagctcagcactctatgcctaggttaacaaagaactatccctactcaggcctcttgtcttgggatttatcagctactcctggatcatcacctgcaaacatgagccccaacaggggtgagataataatcttagtaaactcagggtccttggaggtctttcctccccctgatttacttccatgcttatgtaatataaaaatttgcattacaagagccatcacagctctactataacatatcacatgtatatcatacaaggtaacaatatatgtatacacacatcacatgggctgagagatcaactatctcattgatagattctcttaaaacttcgtccaatgcctaaggaagatcatctgacaggtacgttacctttaggacttaattcagttgcctaaaggagatcatctgacaggtacgtttcctcagaatcccattggatgcctattccgaaggaaggtcatctggcaggtacattaccttaggacttaatctgttgcctaaggtagatcatctgacaggtacatttccacggaaatccacactattctattctactggccagagaattctttcaatcacaacaccacactatcacagtacatgactcatcatcaattacagaacactatcacagtgttcctcttattatcaatctaatgattcaataaaacaatacacccagtctcaacaaacacacatatatataggcaatacaataaccatcacccctttagggtatggtggaatacaagtaaaggaaaaactccaagaacaatgagcttacctgatctcagctcaataccggctcttccggcttcgtggtcaccaccaccagcaatgtaaatctcacgccctacaccaggcatgcagacaaatcatcaataacgatccttaaccattataatgaaaggaaacactattcctttctatactaacctcttcgtcctctatcttaggattataagagtaaaccacattataggcgactcacagacccttagcaggatcttcctcagcctaaccaaggccttagggtctctctaagactctgtataagtcaattcaattatctactagttcataaatcaacaattgttccaacatagctaaaacagatataccaacacgttttcaccgtttatttggctttatgaacaacttttgtaagggcacttaggttcatatatatcatagtaccttccattcactcaatcttcttcctacccacaccaaactcaaggtcaaaatcaaacttcatcacaaatcaagtttcaaagttccatattcctcagaacaacctcctgagcatacttttctaaagaacctaagcctaattccaaccctatcagaaaacgggttactattcatcccattaccaatttcacaaattaaacggtgaaatcttaatttcttacctccaatcagtcgaggaaagctggaggatcccttccctacgctctggcatccttgaatcgcgttcttttcctcccaaaactcagctttccaaggtttctcagggaatgggatttctctaagaatctaggctggaatctagctcataagtggttctaatcatgtttcttggtagttagaaggtgtttagatgaagtatggaggagttatgaagctttcccaagctttaatggcggtttggggtcagaggaagaagatggaagggttttggccttcaaaacgtgtgaaatggccttttatactggcccagacgtgttctggcgctgatcgcgccagattccagagaaaatacactttctggaacacttatggcgctaaccgcgccagttctggcactatccgcgccaaaatccagagaaaatgtgtttttcagggcacttatggtgctaaggtcgcattctagcgctaacggcgccgttcctggcgctaatcgcgccaaaaacggtgaaaattggcctgcagctacaatgccacgctatcagcgccagatttgctacagtgccactctataagtgccagataaaataataatatatttttttttttacaaaacaaggttattatagtattccctttaagacgtgtgttatatcgcagaacatgaataattgtatttcacataaattctcagcaccatacacacgtttcaatatatttgaaatgaatttggagggaagaaggttgataggaatgatagcaaatgagcaatactatctctgacacaccacactctgatactagttaaaatttggatataatgctatatataacatatagatttgaaatcatctttatcgaaagcaattctaactttaaaacaaattgatactatgtctctaatccagacctattcatgactacaataacttctcggttgtactattgtaagatatataaataaataacattccaggataatcaatttcaccatccctctaacatagacaagatcacaataataagtatagtagacttaaaaactcgtgctaaagttatttgggtgaattttaaatacctttgtgattcaatcatgggcatgcgtgctgtaataaggtcacagtatatcttaataagatcatatgctgccatcgttttctcttccttgactacatgttcaacctgaatgcagaacagaagtcaataaaaacttttgaaatcgagaagtaatggaaccagggaataaaagaaaatggagaaaataatatcttgaacggggtcactgcttttattctatacagcattactgcactagcaccatgtaacaaataacagctgaaccataagatgaaaacaacttcatgcttgaaactctttgaaagatacatcccaagaatgcataaatcactagaactctaaaatatctctcatgaactaagcacgataaacaagtgagggaacaattaaacaaaactagaatctgaaacatatatgcaattaaataacatacacaagtgggagaacaattactgatagtatgatactagattaatacattaaattaaagttagcaaagcaacatccatagttccatacattaaatttaaaatttgctaaaaacaagtccaaaacattacaactttcaaaatgcaaaatgattaaattaaaggagtaattgcatctaagcatcttcaaaagctactgtatttgatcccttggatacagttggatccatatttaaaacacaaatgtcatcgtcaccatcttcaactacaaattataatccaaaaaaaaattagctaatgaataataatgatttaaaagaaaagtaattagcaatttaaattgtaaaataatgaatttaaagaaactaccattctcagcaaaaccatgcagccaactacgagtacaaatcaaggcttcaacattttctgacaagagacgatttctatacttgtttataacatgtgatccaatgctaaaagcagattcagaagccactgtagtaataggaattctcaacacatcacgagccattatagataattctgaaaagcgattgtaattatccctccaccattgcaacacatccaactcttcatagtacacaaaatctaagtttggctcatccaaataaacatcaatttgtgactttccaactttagaagcaagttgactattatgcattttcaattcctattacatgacaagtggaacacaaaaaaataaaataaaatcaatgaagtacacaacacaaaaaaataaatacttacataataacataataataataattgtataagcatgtacttacaccaaacattctttgatttatttccttgagttgctttgacatgcatgaagaagtagtctggggtcttgggtgaagattgtgaaaagaggcatcattattagtgtttcttgggtttgaatatctctcaaagatcttgtataactttcttcgcacgtcttggatcttttcctcacaggtagactcattagttgttgagtaacaataagtcaatgaagtaaacttaatacgtggatcaagaactgcaccaaatgcaagaatggtgctatactcatcccaatatttgttaaacttcatcatcatcatttcctccatactccttataacctcatcttcactttgcaaactctcagtaagtacacgctgaattttccaaacttgcaagaaatataggttggaagtaggataggaagtgcctgaaatcaaatttgtattatcaaagaatggcaacaagaactcacaaattttttctcctctttcccactcatctattgaaggacaccacttgtaattaggatcttttgattgaaaatttccaaaagcccgtttatatttgagagcactcactagtatcatataagtggaattccatctagtggaaacatctagacacaattgcttcccactaccattagattcaagaccaagttgttgaatacattctttaaaatttctcatcctaccctccgatcccttcaaatatttcacactctctctaattttatgtaaggcatcactagcaacttttaatccttgttgaacaataagattcaaaatatgtgcacaacaacgaatatgaaaaaactctccatcacataataaccaaccacttgttccaatatcatttttcaaaatgtcttgcatgttatcattggaggatgcattatctaaagtgagagagaaaatcttttgctctattttccaatccttcaaaaattgaaaaatccttgaagccaaatcaaatccagtgtgaggaggaggcatatgacaaaaattaagaattttactatttaactttcaattatcatcaacaaaatgagcaattaaacatatgtaaccttcagaggtacaagatgtccataaatcagaagttaaacatattctatttggaatgctaccatcatcttttttagcttctccttctctctcttgtaaatggttaggacatcagattttatagtattcctagaaataggctatgcatcaggattcaaatacttaatccaacttctaatctttttatactcaacaaagttaaatggcaaatcatgctcaatgattgcagtagcacacatctcacgtgacaccatttgatctaactttggagccttcaattttccttgtaaatctaccatcatttgaccaacatcttcaaacttaattcccttacactttgagatatgacgatttaagtgagatgtcccatatgcattacccccaattttatactttattttataggccttacactctgctctttctatcccatcatcacccactcctatcttattgaaaaaattccaacaatctgaacttgttgctttccttttcttcttgttttttgttggttcctcgacttgagatgattcaataggtagttcaaaattttcaacatgttcatgctcattcacagtctcagactccatattacaactatcataaatcaaaattaaatgaaaaatagaaaatcaacctcaacaccaggaataacaatataaaatatatcattttcaagagagacaaggaacaaatgcagatgcaggtgaacaaattcacaataaaattggtggatgcaggatgcaaaggacctataacaataaactgaaaaaagaaataagaaaaaagtgtataaatatgcttaatttcgttggatcatccactattggtttgtaagtcaaagaggtgctcgggtgctagtctcggcccctacacattctttgggtgatttggtttcaatggtttgcaagtcaaaaatatatagatcaaccaaatctattccaacccatagtgttcgatccttgactatgagaacacaactaagtgtaaagtgatgagcttgtgaataaaaccaaaggaggcacagggtaggttctggtaaagtgaagtatttggtaaagtgaagtataaccaaatgtctaggcaaattgccattatagaccgaataagtggtaagctatcataacctcaaaggtaaatcaatgtataataataattactcacatttttgtatggtcatcttggaatttgttatggattggactaggacccaacagaataacaactctcccaagttcagatattgtggaggttcaaagttacgagggttgcctgaaattaactttagtaacagcatatataattactcacaagaggtcttaagccttacactaaagttattctaaaacagtgatagagccaacccgatttcatcaaccttttataacactaatgtcattataacatatgcgtatttaatatatcttgtcattctaataagattattaacttttactaagtaccctacccattattctcaagagcatctcaagtctcaaccatgccaaaatcttggcaatttcaggaaaaaaaaaacgcagacgttaatcatgtagcagtagcatactaagacaagtgaacaatctacttcagagcagtgatcaattcacctaacatctaccatcaatccattccaaatttatcacccatatcaacagaggttcgtgaagtgaagcccccgcgtatttctcttcctgtcttcttattcaattggttttgaaataaaatattttacattcaattgcattgtttgtttaagagattaaaataatactaatatacatgaactacctacaacaaacaagttaatgttttaaacaagttatgactagggttcctcaaaaaaaaatgtgacttggttcaaaatcactgtacaacatcaaaaccagcaggaagcagtagcagagctcaccagttatcgaaggaatgcaggaggtgcagacgaataaaggtggaatcgtggaagctcggtgacgaagctgtcgaaggaaggacgaaggtgtcgccatgccagaagcaggaagcctgaagggggaaggtaccgccatcgtcgtgccggaaaaaagaaggacgaagccgctggacgaagccactgaagacgctgaagcttgaacgccgaacgcgtactcagactcgaagactcgaagcctgaatgcagactcgatctcgatctccgatctccctctaccttgaagcctgaacactgaagctctctcacagacttgagagttgagacttcactctaccctgattctcaaatctctcaactactcaaaaaatcactgtgcctctcctctgcccaaagccccaaatgcacagtaagtaaattgttatttttaaattttatttcgtgttgactcagtgtctcaatctagcactgcagtgtgtgtgagtgtgacagcatataatatattaatattgtataatttttgtgtgggctggcccagcctgggcctggttatggcccgtattatagtgggccgggttagcccggcccagattttcttagtgggttgtaattatcaacccggcccagattttcttagccgagccaggcccattttgccatccctagtcgtggctcccacacggtacgtgtatttccattgacgaaatcatgagcttttttttcttttgcatttgtgttctttttcttctgagcttctttttctgttgtgtaggttcttttccactgttggtgtaacttattttgctcattactagcaagaaaaaccgtgaggtaaggggaaaaagccaacaaaatcgtgagctagcttataccttttctgttgtgttgaaagttcttataatgtaatggacatgctttgtcactgtctgtagattgttgtggttaaaagttttgcatagtgtataatatcttatgaagcaactgattttgcatattgattgtttaaacttgatatggcattgttgtggcttcattcttctcagtctttcatatggcattgttgtggcttcattcttctgagtctttgagtttttccctataatttcaccaattccacacaaaaatcagaatgtaatatgttgtgaatgctttcaagcatcattcgactaatgttttggtccctattgatagaaatagaacatgtcttaagccatgtactgctctaatcatttcagatatctgcattagacctgtttacttgcaaagattgtagaaaattgtatacaaccaagtatgtagatcaagttatgcatcccgtagaactgctttcatttatatatagcccaggaagcagttaatacaagtgatcattcttgagaatcaacaattttttgttcatagtgttgttatggtaattagaagtaggacctgtatcacaactttaactacccaattcattagtcaaatcatacggattaagtttgtagagattgtgtattgaaattttggtaaaacattagaaaacttatacatatatcttttcttcatttttccattatcctgaatcctgcaaaaacaactctctaaatgtgcaccgaacaaaagacttactttttctaggcaactgatttgtaattaccaactcaataaaaaaagctattagatatatctccattactgtaaatgtgcttttttgcagtgctctcagcacttctttttgacatgtgtgacttaccctatgaggcttggcttttctgttacctttccttctgaaggtccttcccattatctctgccatcgtagactaattcatggtaaaaaggctaaataaaattggatggtgatgtggcattccgttgtttggaatttgtggctgttgaggaattctatcattttcagtagtggcaactatgatttatttatttatttattagatttagtttggatgtattcctggtcctggttccttcataaaactggggttaaaagtgtttccttctctgattggtgtggctgtcctattgaatgcattagagcaactggctaattctgtctgctgcctttggttcttttaagggtggggctctttggatgagcaagattaattgttttatggtacatagcttcatcgaatgatatgacaaaaaataatgtatataattttagtgtaaccctcttttccaaatttattttgtaaagttgagttaagtggtcactaatgtcttatgttttgactttgatcaaaattctaagttctaaatgcttgtttaatcggtgatttgctggatgtaatattgtcttgagtagcttatgatttatgtgtatgtgcattttatgagaactaataagttaatgagctagaaaccaaaatcaaacaagtgactactgactgccattagtaccatacgtctaaatttgattctaatgtttcttccatgcaaaatgtgctttttcatctgatatgctgaattagaaatagaaacaaaaccatacaatgatttactttggttttggcttgacatatgctgaattagttttgcttgacatatgttgattttaacatgcaacgcaatcctacaggaccacatctctctcacgcactctctcttcgcccagtctccctccgccccaaaccaaccacagtttccgctttagtctctgcaatcccaggtgaacacccaatgaatttggacttttatatacaatattttgtatgtcaagtatgcatgttgccttttctatacaattaatgttcattatgagtgaaccttagtttcccgtttgagattcattacagtgattcttccggacagtttgtattaatcattgtattgattcttgaattgtccgtttggacagtttgggaagactcgtatttttttagtatattcatatgtatagcttgtgattcttttcttaaatttgatgaaatttcggtacaatgcatttgactttgttttccaggtgcatacttgattgtggtagaactcatgtcattgctttcatgtcgtgtacttggagaccaaagcgaaatgctgccgaaatttcatcaaatttaagataagagactcaacctatacatatgaggttttcatgcatggaataactttgtgagtatcacagagttattaattagatggatcgaagttggatgaatgcaagtcgcatcacggttgagtatgaggaaggcgttgaacatttcttacaattttcccggaaagaattcgatcggatggggatggaaaatatttctatccctgtatcaattgtttgaatggaagacgccaagcactggacgacatacgagagcatcttctgtgcaatgggattaagaagacttataccacatggatatggcatggtgaattgacagacacgtagagggtctcgcaaactgaatcggttgatgttgacatcggagatcgattggaagatatgattcgtgatctaggacatgagtcttttcagcaagcacatgcccctatgtatgatacattggaaagtgattcaaagaagcgttgtatccgggttgcaaagagtcattgacactgttgtcagcggtgttaaatctggttattgttaaggccagatatgggtggagtgacaaaagcttcagttcactgcttgagataattcaggacatgattccagatgaaaacatgttgccaagaagttactatcaggagaaaaagattctttgtccgatgggtatggagtatcagaaaattcatgtctatcctaatgattgcatattgtacagaaatgaatttcaagaaatgcatagatgccccaggtgtggggtatcacggtataaactgaaggccgatgatgactgtagcattgatgaaagcacaaagaaagccccccccctcgtgaaggtgatgtggtatcattcgatcattccaaggtttaagcgtttgtttgctaatgatgatgacgcaaaagaccttacatggcatgcagatgggagaaactgtgatggaatgctccgccatccagcagattccttgcagtggaagaagattgaccgtttctatccggaattcggggaagaacctataaatcttaggcttgcacttgccagtgatggaacgaacccctacggcagtctaagtactcagcacagttcttggcctgttttgctagtcatttacaacctgcctccttggttgtgcatgaagcaaaaatacatgatgttgtctatgatgatatcgagcccaagacagccaggaaatgacattgatgtttatcttagtcccttgattgaagacttgacaaacctgtgggatgagggggttgccgtgtttgatgggtatcgtaaagagacattcaagttgcgtgcaatactattttgtaccattaatgattttcctggtacggtaattttagtgggtacagtgttaagggccatcgtgtatgccctatctgtgagcaagacacgagttacttgcaacttaaacttggaagaaaaacagtttacactcatcatcaaagttttcttaaaccttatcacccttattgcctattgaaaaaagcattcaatagaagtcaagagcatgaaactgcaccgattccattaacaggtgagcaagtggttgagcaggttcaggacatccatacttgcatgtggaagaagaggtcgatattgtttgatcttccatactggtctgatctagatgttagacattgtatcgatgttatacatgtggagaaaaatgtgtttgacataacattcaaggcaagacaaaagatggtttgaacactcgtcaagatcttgctgagatgggtatacgtgagcagttacatcctaggtctgatggtaagaaaatttacttgcctccagcatgccacactttgtcaagaaaggaaaagataagtttctgtcattgtttgcatcgagtcaaagtgccacagggatactcttcaaatattaagagtcttgtacaaatgaaagatctgaaactagttggcttaaagtctcatgattcccacgtttggatgcaacaactgttagcagtggcgatttgagacattttgcctaacaaagtcaggcatgctataactcgcttgtgttttttcttcaattccatttgtgcgaaagtcgtggaccctgtaaagttagaagacttggaagaagaggcggctattatctcgtgtcagttggagatgtattttcctccttcatttttcgacataatggttcacttacttgttcatctggtgagggaaattaaattgtgtgatcccgtttatttacggcggatgtacctgatcgagagatgaagatcttgaaagggtatacaaaaaacctacaccgtcctgaagcatccatagttgaaaggtacattgccgaagaagctatcaaattttgttcagagtaccttgaaaaagcaaaacctgttggtcttcccgagtcgcgacatgacgagagagtgggaggaaaaggtacacgagggctgcatgttataacgccttctttgcaggaattgcaacaagctcatttgtatgtcctcaataacagtaatgaagtcctgccatacatggttcgtcatcaagcactactgaaggaaagtaatccaagaatgacgaagaataggctgttgaaagagcataacaagactttcctggaatggtttaaagatacaatattgactgatgattatgcatctcaaactatgaggaagttagcagatgggccaaaaagaaatgtaagaagttggcaaaggtatgatattaacaagtactcgttctacaccaaacaacaagatgacaagagcacaacgcaaaacagtggggttagcctaagggctgagttgcagcacttcacaactgtgcatgaccccaatccacgtttggctttcatgtcttactttgaagtaattcatgacatctgggaccttaattatgttactttcactgtgtgtgttttcaagtacaagtgggttgatatcaatagcggtgtgagaacagaggacttcatatttactttagtaaatcttaacaagctcgcttatcaagatgaacctttcatcatggcagaacaagctaaacaagtgttttatgttcaagatctaggttcaagattcatgtgatgaaaggtggtcagtggtactccatggaaaaatcattgatattaatcttgacgatgatgattcaacccttgatactggtgtcactcagttctcgacacccatgcctgatgtcaatagagaagatgttgttgatgatgttcatgcaaatcgtaatgatcatgatgaaggagaattaattaacatcacttaatgtaatttttttgaataactattttgtacttttacaatttcgaatgtaaccttacttgtcagttaacttgatttatctttggttttgtttttaacagggtcatgactacaccaccgacctcatctcctcctcctgagtcagcacatcctccgcctgagtcagcacctgctagtcctgagtcaccacctcctcctcctcagtcaccagcacctcctatggggaagaggactaggaaagcaacacggttgcgctcactggctaccagacctcctggtgctgacagaccagtggttcatgttgatcctaccactgggaagtgtgatggtcctcaggcgaagaaattgaggacatacctagggatcgttgctagagacaaggtcgatgtcaccattgccacatggaaggaagttcctgatgcgcagaaggagttgatatgggaggacattcaggtatgacaattaagtctccaatgtgattgcctatagtgatataatataaatgttattctaacagttaaacacacttcattataacgcaggctgaatttgaaatacctgaagcgtccgaccaacgaactaagaagaaaattctgcagacagtaggtgagcgataaaggcagttcaagttagacctgaccaggaaatgggtcttgggaaagggcgacgacgacgatgctgatgttgtctgtgagaaatacggtatcaataaggaaaaatgggcccaattctatgagacacgtaaagccgcttccttggaggttaatcgagttacattgttttacaatttcacaactatgaagtcaaacaaacgcttttttttaaccctatatgtgtaattcatacaggatgttagaaagaaggcccaggacatccagaagctgaaaaccgcccctcacgtgtagtctcgcgggggttatgacttgttagaaaagaggttgatggaagaaaaacaaaagaaacaattggaggaagctacccgtgctgatagcaccgagaccatcatccaccctccttcccccgtgagacgacacgtcaagtggaagcttcctcgcacaaaaaagaccggggaaatgacttctgaggcggtacgtgagattgctgagaggattgtaagtcaaacaacaatctcaatgacattctatatgaatttttgcatcacaaatgacaaaactaatgttgtacttattttcattgcaagattccctggatgagcaatcctcacagggtacttttgtcgctagtggacgtcaggatgtcctgaatactggcattggacgaccagagcaccccggtcgtgtccgtggtgctggagccggtgttaccatcacccattactttgaaccggtagcctcaacctctcgcaagtcggcgcctgaagacttgggtcgcctgaaagacaacatcagggtagagctggagtagtccatcactgatcgacttacacagtcgatcactaaaagagttacgtaacaagtgatgatgagcttcaaccagttgcaaacccagatgcagtcttagggtgccatgcagcctccagaggttcagtcatgtcctcttggtgcccgtgttagcaccaagggaagctgtgtcgatccctcggggaatgacccagacacgagtgcatctaacaggcgtgggttgtatgtcgatgacaatcctccccgccttgtttcccttggcagagtttatgagggatcgacaactgtgcatagcgtccctcttgccactaatcaggtaaaggtgattgttgaggaagtacgagatgctgatgatcgcgtccctgtacccactgacgaggttcagttagtggggcaggcacttaacactttccttgcttggccgacacatcttgtacagacaattttgcataaggtatttcattttttccttctttcttctcatttacgaatgatttgtcacatataaagttaacctgatcgttcacttatggttgtttactgtgtaggataaacaagaacccaagggaccggcgaaacctgtagataagccagaaaatatttctaatcccttgtaccagatagcattgatcatccccgatcttttcctcagacccttccaggtgccatgggacccgaagatgttcggggtgcataatgacaacttccccttgtacatcaagcatgaggatatttcggagatcatccatagtggtcaatgtctcaacatctccgttatacaattatggattctgtaagtcacttgcaattgactagcattacttggtgaattgttttatattcttgcataattgactttattttcatagtacaataggcatatgaatcaattatccctgcaatcggatcatgccgatgtgtatggattcctcgagccacagttcatacagagatccggccaatctcaatttcaaattgaggactatatgaagaaatggatgcagagttcaaagaaacatgtctaccttgcaccatatttgaatgggtaagtatagaagagtatcacaatttaattaatgtatgcaatatagtaacttgtttttcgacaatgcagtgcacattggcaactggtagttatatgtccgaatgccaatgtagtcgtctggttctgttcgttgcataacaggcctgataattaccttaaaggaattattaacaggtaggttctaattagtaacacatttatgttatttctatagttgaaaggtaaattgtacactatgcatgcatatttctcttaagcagtgctttgaagggagtccatgacactgaaggaaataaatcaaaggctacaactaaatggattgcgcttaaagtaagtcttttaataaatcatggttcatgtattgaaaataatttttattactatttacactaattgccatttaactttgactatgtttttcaatttagtgtaataagcaaacaggaagcactgagtgtggctattatgtcatgcattggatgtcaacaatagtccatggaggcttcacagataactgggacatggtaattaattgtctaattcaaaactaattatttttttacttgtttttgttttgtgcttattaaattatgttttcttatgtcatgtagtatttcactgatcaaagaccactggaagccgacaccttgaaggctattagggttcaatggacgaagttttttcttaaaattagaaatgacatattagtagatttggtggttattggattttcaaaaccattatataaacattaggttaggaaattcttttatgtacattgacactattgaattttatttgatattgaaatattaatttattttaatgtattgtgaaattggctggatctggtatttaaatttacaggttgaagaactgctaaaatttaaaaaacagacaaaatattttttaaaaaattaaataaacaacatcagttctaagaaaatcgatgttaacttagactacaacatcgattttctttgcaaaatcgatgttgtttacatcaaatcaacatcggctttgaaaagaaaatcgatgttgatttaatgtaacaacatcgattttgtaatgaaaaccgatgttgttacatcaaatcaacatcggcttttgataaaaatcgatgttgtggtgttccttaacatcggtttcttagaaaattgatgttaatgttccacatttttaaggttttatttatcagatatggacatcgattattgctgaaaaatcgatgttgtttagtttcgttaacatcgattttcaaagccgatgttaacttgcacatattcaacatcgcctgattcaacatcggttcaaaatcgatgtggaacgttaacaagaaccgatgttgaatgctgtttttctaatagtgtaaggtcgcatttactaagaagcatttcaagaatgaatgaatagttggacgtctgaatggtgatttagatatcatatttaagatcatgtgtgtctaagtactattcccaggcaaatctaaccatcctcatttctaacatactaacacaatatttctttcagagttaattcaataatcttctacattattggattttttatttctacactcagcctcaaaatttctcaatgaaggatatgttacattttccgtaagtcaagttttctactaaaaaaatgatttttaccaagaaaagcgttgaaattaaattcaataatgatacaaatataaaatatatgagcgatttgacaaacagagaaggaaaacacaaacaaatgcttacccttcgttgcggaatttcgaccacgagcgagaatagctgaatgaagtcactgtgacagtgtgaatctatggtccaatcttatattttatatgctaatttcttttgcaggcctgttgtcagtgctcacaagccacatataaattgggcttgcctcaaaacaattttcatatttatttatttaattagtatatgagtcagttataacttattccaaaaatcacatgtgaatatcaacaccttacaatcaccaattttatggaatatattctattttctaccagtgcactgatgagatatgataatgacaaatcaacacatattgtcttaatatatatatatatataaatatatatgtgtgtaaatttattaaaattaaatttatatataatatctcacacacgaaaatattttttttattgaaagcaagtttattaagttatatttaaataaaagtatagactctttttcaacatttttttatatttattttctttggcttttctcatatatatatatatatatatatatatatatatatatatatatatatatntttaatgaaacaaatatgttgggtttaacaaaatgaaaaatgaatgatgatttatatgtaagaatataattaatatatgatataagatacactagaataaagttttttaaatttttattaacattttcattccaactatagatgtaatatttttattgtgagcatatattgaactttgtttgtctttatttgaattataaataaaattacattcaatcatgattcacataaatctacattatttaataaactttgttgttaaactcaaataacatacactctcttcctgtgtatacgcatagtaccatactagttgaaatcataaataataacaacattcactctcatactattattattattattattattattattattattattattattattcaatttaatcatttaataacgataataattttaatcacgacaacaactgtctcatcgttgcccctcttttcgttgctcgtcttcgcccgacccaattgtaaatgtcaaatgagaaatcctctacttgtccgacccaactgtgtgcggcagtggaggtcttgctggcagacctcacaaagagccacattgtgacttccttattcaggtcttgattaattaacaagttaaggtcatgtttttgtctttcatcaaagatagaacttttgctccaatgtctcgtgattcttctatttccaataacatagttgtatgaaaggttttggtttcctagtgaggagtacaagaattttcagtggtttcaacgagattatgtgttgacgttgttcaatatgtgtggtgttgtattttttacttttttaaatttgaaagaggttggaggatatgatgattttttaatagtttattttttaaaaaataaaataaagatagtggcgattttcggtgtcaccatgttaaagttaattattttaaaaggtttaaaatcacttttggtctatttatgtttcattttggtacattacattttaaaaattaattatgattttttatgtttttggaacatatcattttgatccttttttaaaatttaaaattaacataatgcaaacgtttttaacgaaaattaaaaaaatgaccaaaataatatatttcaagaacataaaggaccaaaatgaaaaatttaacacttgatgtaccaaagaaaaataactacgaaatataatggatcaaaaatgacattaagtcaatttaaaaaaatacaattgtgaaataaatgctttttaaaataaatattattttaaaaagcaaataaaaatttagtttttaaaataagaagaaaaatatttttgtttaagctcaatcagtttaaacaaacaaaccaaaaaaatagaaaattatttattttatttaaaaaatacttcttttaacaaatagttttaaacaaacggattttagttgttatttttttccgtgatggttatacttgtaactccatgtttattcctaattcggtgacaagtgttttaaattaaattaaatttatggttttttttacagagaatttaatttatgttttaaaacattgattcagtaaaaattgtaatatagatcttagcaacattattatgcattttggtcaaatatatatcttcggtggtgccagtgcttattatattgttttccttttctttttgcttataaagccagtgcttgttatgttagacacatgaacattagaacaacaaacaactcgtaattttgagaagttgcactcttaagattcgacacgtccaggagccattccagaacgcatactaattttgatacttccatataataaaattggtaaactactaactatttgaaaatttgaaggtaataggttcgacctggaacgttgaagtcttctgattacaaaaaatcacacattctcactaaacatgtgccttatttaaagagaaaatctttaacattgtatataacatatattacctaaaagagcaaactaaaatttcttaaaaatattaatctaattaatatgatatttaatattctcaaataaagaaataaatatgtatctcttaagcataaaggaaaaaaaaaaaacataaatgaaaaaatagactggtcgcgggctagatcacaaggccttgtagatttaatgcatatttgattttaggattttcttcttacaccattcaaaaatcaaatacacctagcaataacagtgtaattttgaaattgctctttaataaaaacctttagcttattcgcgcaccattcttcttccttctttctttttattgtggtataaatcatatggattaggcaatccgtatgcttcatacaaatgatctatggtaccgtaacacctactacgacaacgagaaaatcaaagtagttaccaaaccatggtcaggagaagaggtccgccaagaagaacaaataaagaaggtaatcaaggatgaataagaagcaaaaacaaggtgaaaaataaacaaaaagaagaaaaagaggaggaatggtaactttcaaattaaaaacaaatgaatgatgtatgagaaatttaaataatgtagaaaaaaatttccttgattcttaatttaagtctgtgaactcgaccgacctgtccaaaatctaaaataacctgtccacaagtaataggtgtaatttttttaagcccattaaccacccaatatgtgagttaaaagaaccggtccgtgcatctaagcccatgtagccacctcttacccctacacattcacactaaacaggtgcactgtcacaattatgacacatcatcggtctcaatctagctagtttgctaattaccccgaacatgtatccaccaatgttttgctgccataaattaagcatttgattgcaagaaaaatcatgcaacgaataatgcttcaagcctactctacgcttactttagtgacttagtcctagaatcaactagtgacataatgctcacgatattatgcgcgcaattaaccaagtgtgaaatgaaactttgattcaatagtcctcaattattcttcggtggggatgttgtcaagttcctttgtttctccttttccgattccactgtgtacacatttttttttctgaccataatatttgatgaagacattaaagttgaaagatcgacacaagaattaacaggatctatggtcagagttaaaaaggtagaaaaaatcctaaaataagtggtaacaatgattcttgaagttgtaatgtgataaaggacattgaaccaaaattattttagtacatgattattattaaagatccataagatcgacacaagaattaacaggatctatgatcagagttaaaaaggtagaggagatcctaaaataagtggtaacaataattcttgaagttgtaatgtgataaaggacattgaaccaaaattattttagtacatgattattattaaagatccataaggttgaaaggtgttgttgtcgactttcttttttatagaattaaataaagttgtatttttttcatagccttagtgttttttcttgtgcacctagaaattatagtcttaccttcataattgcgattaatggtacatttagaataattaaaggttggttgcttatgtgtacacgaaatttcaatagaatggacagacttgaattttcagacaaatacctatgtattgtgagaatattatctaggtttcatgctgaactcgtttggatttatcagcagctgtccatcactcttgtggcgtcttcctttgacttatttttcattgttagaagtggtgtcttctatctgtcatcaagtgatatgtaactagaaccgtgtcaatattggtacgaaatagtcttattggaaacaatgattaatcttggttgggatcatgagtacatataaaatagatattcctctctcaacataattttttctatacccaaggaccaaaaagtattcaaatcctggactacttaattaaaagatacaaatctatcacttatgtcaaccattttttatagaccatacacatattcttctcatcttcttacacttctgcttttggatttgtgagatcttccccctgacgggtccattaaaagaatgataattgataagggcaaacttttcttatgtgacttttgattcaccggaccttctcctactactgatctaataaaaattcctggaatctcctttacctgttatggaatatattaaagtaaaaaaggagctcaaagtacatacatcatcagcatgttaaagagaaaggtactagctactactacaataaatcttccctttcttttcttgtttttcaaacatttgggccacttaccataaataataaatattcctttatttgaatatgaacaaagcctgccactaagcaattgtgtttcgagacagaagttgcatatgcttgcagatgaagaatcaataacctcccccaccccccgtgctgttgctggacccaccaagttatactctcctgtctgctaaaaataaataaaaaattatctattgaagaaattatcatattggtatgtattgtatgggttaatgtaagtttccatatcactagcagttgaattttggacagtcaaataataggtacaccaacttatttttgttgttggcgactgtattaaggacattatttaagaaatttttaaaaaattattaaaaattataggaaaacatattttttttatctcaataaaatttattttccttttatttctttaaccaagttaatatttgtcttttttcatttatcggaagtgtagttctttggatttttttccttactaacgaaaatctttatatttgataattgtaccagagttgaataagattattagggcatttctattctagcatctcctatatgaagtttttagcgggtcttacttgtagatatctctcatttttatttttatttccaacttaaacacctcataataaacactcaattcctccaactcaagcacctaaaaaaacattgctaaataaatttcatcattaacctcacatccttacattttattaataatttatttattaaattacttttactaacattgactcacaaaaaaatttaagcatcagtacttctacaagcactagaatactagatgctagtacaatatgctcctaatgattttcaaaagagtaagcaccagtggtgcttacctttttatgaacaaaataaatgcatcattggagatgatcttaggagtgataattttttttaatatttaatatgactatatatctaaaatttgaattcaaaattattatttattggttaaactagctagaatacttttgtcttcgtgtagctctttggatggctctcttataaaaaaataatagaataataaaaattgattacaaccatttaaaattatgggaaattattgagcagttcaggcagactagctgggaatccatggtgctgaagtggcagtgttttgaggaccaatcattgaattttgattcttgtgatcaaactctagaccgcaacccaagaaatttgagaaatgacttgatcgaattggcttttaaagatttgttgttggccatcatagccttcctttttctttttcttctttctctctctctttttttctttagaaaaattcttttctcctcttcaacttggatatagatttcagcattaaagcaaatattccctttggaataatttctttatgagacttttatcctgaatgtgtcctgtggattgcttttgtattaaaagaaagtgtatgttcacacattttgtgtgttcttaacatctgattttaactggttaagattcttactttcacataaaatttcatttctgttttttaatcatagactcatatattaggcatattttgcgtccatctctgttggcttatatatatacatcatcctaacctaatgattaatatagggttagtgcttagttaaaatagggtccctttaatgaacttcggggttgaaattttggtggtaggataatataagaaaatattatgaactgttcaatgtcacgaacggacacattttattagtgtcgttttgataagaggggtacgacattagctcttgacacggttgattagttctctttcttctagtaatgctttctttataaagaacacggacaatgggttcataaatctaatcctagattctttgattcccccatccctacaaggaacaaaaagaatctgccaatcgcattaacacaaccttctcatcatagaagaaaaacccaaattaaagtttgttaaaaaagggaaaatgaaatttgaaaggaataaagattgattagtttagttttcactttcaatcatcacaagcaagcaaatatccatccataatagcaattcctataattttttattacagtatttttacctgatagcttctcacacagcatttaagaaagttgcatccattattcatcatggtggggcctatccaattccttagggaatcaaacttatggagagagttaagtgggaaaacagcaagataaaaacaaaccatacactttttcctcttttctctgcttttaagactcaaaattgagctgttttccttttttgtttttgctgaatcagagattctctccacccctttcaagtcaaagaagaaagggtagtgaggaaaattaaaaaaagaaatttaaaaaaataaaataaaaagttggtatgaaatgtgaagagatgagagaggaagagccatagctcatggcatatattccgccaacataaccccacttatgcttccttacatgggagtgagatcatacaacatctcaactactctctcaatttataaagagaaactatagactatagtctatagctgccacacattgaaaaaatagctaaaagcatcaaaagtagtatatatttttatgtttcagtaataacacaaccaaaaaaaaggcaaaatggatctgcaaaatgtgcaaaaccaaagcatgatgcgtttggttctgtccactgatgccaagcctaggctgaaatggactcctgagcttcaccaacggttcactgaggctatttatcagcttggaggtgcagatagtgagtataatacaatacaatacacacacacacttagaagaactttactatttttgatataagactttatattatatcttggctaatgtgtattaattaattgttcacactttgacatgtggcagaggcaactcctaagagtcttatgagagtgatggggattccaggactcactttgtaccacctcaagagccatttacaggtatgaatctgatggtatcataatttgttgctttcactgaatccaaataaatcacgagtttgatcttattttgtgtttttggtcacagaaatataggcttgggaaaagccaaccactagaaacctgttctgacaacaagaaagaaggtgactcttatagtgtctggtttagcagtaatgttggcatgactagtagtagttttttttttttcctcatttggctttggcataagctaactttgatgccctttattggttcaggttacagtgaaatccagaacagtaatggtcattgcagcatggaaatcagcattgggacccagaatcagatgactgagtaatagttataaagcaaatatatgtatatgtctttttatttattgatgttgcatgtgaacagttatgtacttgtgttatgcctagaattttcattgaccaaaaatgttgtgtttaacagaagcttgaagattgctgaggctctccaaatgcaaatggaagtacaaagaaaactctatgaacaaattgaggtagcatgaactcgttatattgtctaatctctaaacttatttctatatgaattccagtttttagcgatatgacatgttaatttttggataatgtttttaggtacaaaaacatttgcagcttaggattgaagctcaagggaagtacctacaatcagtgctaagaaaggcacatgaagcacttgcaagacacagttcttccacaactggtgtagaacttgcaaaatttgaactttctcagttagtgtcaataatcaacaatgcatgtccaagctctccaatttcagaactcacagaaacacgagggttaagtttgaactgtggagagaggaaacaagacagaggaaccatgtgttcacttgaaagctctttgacatcatctgaaagctctgaacaacaacaacacatcatggatgaggcagaaaaccctcaaaagtttgatggtgtttcagttgaattgccattgatgtccattcatccagcagaagttaaagcattcaagggagatacaagtgttgacggaagaaagagaagtgcagaaactgattctgatcattgtgttgatcaaccttgtggcaacaagaagttgaggaaatctgaagtgtcacaagtgcttgacttgaacacccaataccagagagacattgactcaagtgtgaaagaaatagatttaaatttcagttcaagcttttagggacaataaagatgtgtccggttatattaaaaacatatgcaacaaaattcattctcaaaagaaaatatgtttataaactatgtatatttttataatgagaaagaaaaaaaaaaagtcaagaatagttataatacacatatatgcacatttctctcaatcttcttattcttctcttaatgttgtgtctgatattggaccacagagtaaccaatttctactgtcacaactttgtaatgggcacccactggttttatttattctccttttgtggcttctcaagaccctactagagttttagtgacaccaaagcaagcaagattctattgtgaaccaatttttaccaacatatgcctaagatactaatgggtaggacatattagtcacagtaacttttagttgtaaaaagcaacgggatgtttaattttatgaagtaaaagcttgcttagaagaacgctgttagtgtttctccaacattcagaggagaaaaacatcacatccacaacatcgttgttactaccaaaatatgaagagtgaaacatgttttgcctagagaaacaatggttttgaatttttaaattttaatccatcggtattactagccaagagggaaccaaaagtttttatggctcaaggttttaaattgtgattgtgattgtagttttaagacagttcttaatattgtgagaaattacagacaaatacaatcaatttgattacaattatgatcttgaaaatcttaaaaagtaaaaccctttaaagttgcggtcaattctaaatccaccatagaccagttcttttattaagaaatattttcataaatacataattctgagttttatgttactctcaagagatatgtaaattacaagacatcccaattaaattaactggaatgatagtttctcataagggatttgtataataatttttttatcaaatcatacatcatagtattttttatcagtaaatgttagtggttagtttattaatttttattagtgggggattcaaatttatgatcaatctcttcctccattcaccatttaccatcaaactaacgttatatctattgatcgatgtaggatgtgagcaatggagacaattgctccaacaaagtaaacttctttatttaaagcagttgttcccataacataatttttaaaaaaagaaacataaaaaaatgatattaattttatctattttatccttttagtttatatttttataagaatatgtattttataaaagctcataatatattttatccatgaaaatattatagattaatatttttcctatatacatcacaggatactagacttctaattcttctaaaggtttgtccaaaagatttgagatataatcctgatcgcggaccatattattttgtggtatagtccttactctttataagtaaatcatatccctccttacaaaccagtgagtgcattatccaatgtagttcttgtgtttaaatttcgtttctgtttaccttcagggtctaagccacaacttgcttgttgtatgaaatcaagggttttgatttgaattttgattgtatgcaatagacaatggcatatgagttgaacgttaattgaggaaatagtagccaggtcttattgttagactgtagttggggaaggcacatgtagttgtcctttagctgaaatcaacgaaaacaaccaaacctcaccgattaggtgaggtaggctacaatccatgaaccaacttacacattttgttccattgaaaatatttcaattattgatctatgttacaaatatttaatgaagtttaacattagctgtcaattccgattgcttaatactactctcttttaccttgacaagaaaccaattgtctaaagatttacaatgttagtatagtttggttgaaaaaaaaaagaagaagaaaagggttaattaattattagtctctcaatttgggatatatatttttttaatctctaaaatctttaaaaaaaaaactttttttcttcaaattatgataaattattctctttagttcctcgcataataaattagtttttttaacgatttttagctggcataaattgatttttaatttttagttgttaaaatttatattttaaaattactacaaagtgttaaatacggtcacaaagtatcgaactaaaaagaataatttgtcaaaattcaaagacataaaaaagtatttttaaatttcagaaactaaaagatataatcttcaaattcagggactaaaacagtaaataaatcgattggaattttgctacgtgctattttatgattttgtgaaatagaaagtacaaagtacagagaagaaacacaaaggattcgattggttccaaggaaaagaatagagtgaatgaaaatagtgaagggaattaatggaaatattttagaaataaagtggagactaaaggtataaggacgaagagaaatgaaaagaaataagaaaataagtccaaagataaatgaaaatgtctaaaaatagagtgaaaaagtatcaatttcttgcattcatataaagtaatttatccaattgaagagtaatgtgtaagtgagtctttcccgatctctctctttatctatctatatgagattaattataaaaaacttatttctcattttaattatttattatattaaattttaattgataagattaattactcattagaattattatatttaaaataaatttaattttaagaaaaaataaatgcaaaatatttctctcttctttaatggaaacttaaagaggatgcttttatacatgagacctacgtttgcttttcttatttcttctctaaataagtagttaaaatttagtatgttgatcttgtatttcccttctagcctcttcatttccttcctctttgtacatactcaaacaaatacaggggcagactaggatgggtgggggccatttaaaaaaagtcaaagttcacattttttacagaaaaaaaaaattgaagttcacttaaaaagtatataaacatcaaatttcatttataataattaattatttataatggtgtaatatttagaaacaattcaataatatataataaaaatataattacgtagaagagaaatttttcaaagaccccatattgaaaatctatctatatatatatgtgtgtgtgtgttactcgccaggagaatttcccctcaaattgttgtaaaataaaagatttggaaaaaaaataactattttaaaagtaaattttgatatacttaatcaaatataagacgagaaaaaaattatgagaagaacaatgacaagaattaggaaaggagaatatttatttatttttaaaggaagaatatttgtcgatatgtctcaaattagaattatcaatttttgtataacgtttctaagattgtcccattaatataattannnnnnnnnnnnnnnnnnnnnnnnnnnnnnnnnnnnnnnnnnnnnnnnnnnnnnnnnnnnnnnnnnnnnnnnnnnnnnnnnnnnnnnnnnnnnnnnnnnnnnnnnnnnnnnnnnnnnnnnnnnnnnnnntcataagattaacaaaagtgagactagttagtaacaaaaactataacaataatgaaggaagtaggtttggtagtattaatagcataattttaaaaattgacctggtaactgaccaggatattgggtcactaggtataagctaaataagttatttaataaggcatcacaaattataaaaacataaaaattttatatctgtcttaaaatatttaataaggcatcacaaactataacatagataattggataccaaaatgttaaaaaaacattattatccacgttcaaacaaacaagtaacaaagattataaacataaactaaataagcttaatttcaagaaacaaaatcatcaataaaaaattatagaatgctaattcccatccaataacccattttcacccaattattcatacttacactcaatttacttttattctatattaatattattaacaaattatgagtattttaaaattatgagagatattcaattaccattttaatcctattttttgctaagtgtcattaatataagttgtttatttttgtaattttgctagcaatttgcttttatataggtatattagattatttcttaagcattaaaaacacataaatccaccttattatataaatattaagaatagttatatgatctgtaattgcttcactttctattctttcatgtccattttcatttaaattctaatatcttctttcaccatgaaaaccacatgcttctcttgatcctaggaaaatctctctctcactatttgaataaattgtgcaacagttccttcttagaagaacttccctcactttcgtttcgatgagttcaaaattcataatatataattgatagattttagtctacttataatttacttgcattagaatttaaaattaatattttttttattataaaattttggagtcccatagggacgggacaggagaaaaaattccccataacagaaataattagttaattatgggggaaaaaatccataattagttgagggacggagacgggaagcgagaaagtactctatgtcccgttgacatccctaagtatgtttggatgcattaaaattcctttattcaataatcaatagtttgatttgatggcatatttcctgtttggaaatcctaattttcttcatagagtaattaactaattatttcttttttctattatttttaagaaaagctggaaaaaaatttcttattcaattatcagtagtttgatcaaggacaaaaatatgattgcaatggtacataaattaacaaatttcatgcatattagccattagggcattagtctgtgacattagcctttgactttattcatggtcttaattaaactcggcagaatattcaactactgggaatcagtttcttgccggtgcctaactttgtcatcaggatttaagccttaaggtggtgtttatttgttatataaacatttactgtatcttgaattcaaagctgaaaaaaccttatatcatttaattttgtgtttcgattacagttgaaaaaataaaatttaattaaacctaattttctaaactaaagtttaattagttaaaagtaagtttaatgtaatttaatttatagttagattttttttttttaacattcaactaaaaagcaagagatgagtagctttgcctatacaatcatctcagtttgaataaaatttacgttcaactcaactaaaaaatgagttggcaaacaattagtaaatataatttttcatgagatataaattttaatttgagtgtccaaatatcaaaccaaaccaaacacagtgttaatgagtctggctgcaaccatgaaatgaagttccttatgcagtaagaaatagcccagcttcaatgttttaataagaaaaaaaaaaaaaaaaannnnnnnnnnnnnnnacttccgcatgaactttttaacataaaaaatattttcattgatttgaaactatcaaaagaaaataataaagatttttctattttatccaaaaataaagggggaatgcacccatttttgaaaaaatttccaagtaactattttaaagcaagtatagattatttgattgtctttccgaaaatctgattattgggaataacatattaaagtcaattctttttttccaacattatcagtatctcatgtaaaattataagtttcgtacttcttaaaaaatttgaatttattagtcaaaatgactacgcatttgacttttttagaacgaatttaataattctttgcttcattttttccttctagttgttccaggcaaaaaaatttaaatattgcacttttaaaacaaaaatacgaaaatactgcagttttaaaactaattacgaaaatactgttgttagtggcgcctcctgtaggcgtgaccttgcaccattggcgccctccccaggcgcaaccaagcaccattggcgcccctcctgggcgtgacactgcagcagtggcacctcccctgggcgggatttagccaccagcactctatttaaagcagatttggtgaaggcaatctccacaactgatattgagcattgttgttgtgtttgatatcaaaaaatgtcttcaaatgctaattttattcgtactgttctatattataatggtagaaaaatcgagggccgacatggtgttgcttttgaaggtgaaaaaaggccaacacgtttgaagcgtaactcaacttatgatgaattgcagcagagaatcaatcaaaaattacgtgtgaaaggtaatcaatccatcaatataattgcaagaatacggtgcgatgaaaaatatattaacatggaagtaatggatgacgaagacgtggaaatggtaataggagaattcttcaaccagtcacggaaagattttctagagttgtatgtggatattcatgaagttgaggatattgatttaccaatgtggtcaatgcatttcaattattcccataatgaatcaactgctattctgccttttaatttgtctatggaagatgaaaatgatcctacttgggttatggaggacgatattgacgatgacgatgatgaagacatcggaatggaagatcgtcttctagcagagaatgctagtgcttcggacgatgatgggccaagcgcaagtcaaacacaaggacgtaactcttttgtggttgagtctcatagccaagaacagcaggatgtgggggaggatgagcagcaacaacaatatcaagatcaaggtgtgttgattaacagtaactatttacatgtgtgattttaatttaatgtattttattgtaataaatcttggaatttggttttctaggtcaaggtaataacgctttttgggatggaatcccacattacacatacattgattgggattatccaagtgaacaagactctggcagtggttctgtatcagttgaaggtccgtggatattagggaataagttgttttttaaacaagaatttgcatcaaaagaagaggcgcaactggcaataaagcggaacctcatgaaaaagcatcaggaaggtgttgttgttgaaattacgccgacaaagttaaccatgaaatgtcgtgcgcatgaccaaaattgtccgtggagggttagagtaataaaaccaacttatggtgagagatggatcgttaccaaatgggatggggatcacatttgcttaaatgagcacatttctcatgaccacagacaacttgatgctaatgttattgtttcactgatactaggaacgtacattgtctacgcctcctaagtacatcccatctatatggttcgagaataacatgggtagtgggatcggtaggctcagcctcattgtcagacccagaacgaggtgactctgatgacgatgactcagccataataatatactacatatttcatataaagaaacttggttttaataataataccacttacttttctcgaatcaattgagctcataaactgtaaaatattaattgtaaatgcacgaattttatttcttatgattcactttatcattttcttattgacctatcatttgtgttggaaaataagagcataaatatggagaaaatttaaatcaatgcaaagaatatataagttaacttacattaattaaaactcttattacatatattttattcacttatagagtttaacttaataaaccatgattaatttaactattatgttttaatttaacaattatcattaaactatactctaaactttaaaataattcaattttataaatattaactgaacaattttttaattatgtttattttagtaatttaaaagtaaacaaaacttcctcaaaaattaaaagaaaaataattatttaaataaatataataaaacaaatttctcaattttataattttagtcactaacaagtttctacatgccactaaccataatttgtttcatttgtcttttaaaataaattaatcataacctacatcactaaaaaataatattcaaacccaaaaaatatattcaactttatgtcactaactatttgtaatataaatgactaaggatttcctaggtcactaagcaataacattctaaggcaataaataaattctaccttaggtcactaacaatttcctacatgtcactaacaaataatattctcacataataaatatattctacattacatgactaactatttacaatataagtcattaaaatttttctacattaataacaatatttttcctaacataatattaccatttatttaacaaaatatataaataaattattcgagcacttacttgggacagagtttccttacgcaaatcttcaaaggcacccaaaaacctagacagaagctagagaaaaaacttttagagagaggaagaaagtgaaaaagtgatttcaaaaagcaaaatgggccttatatagccctgcgtaaacgcgcctggcccaggcgccacttcccttcagtcgcgcctcccatggacgccacttcgcctctgtcgcgcctcctgcaagcgccacttctccctagttgcgccctccatggacgcgtttaactgccatacttctgtaaataacttcaaaattgcagtattttcgtatttttgttttaaaagtgcaatatttaaatttttttgccagttgttccaatcgtcaataaatttgtatgaccatccataaatttatatattcaactaatcatttgccagacatccactagtgtaaccttaacatcatctttaataatcatttcacacttcaaaatgaatataataaacatatataagcttttatatttttttataaacaataattactcaatttgaaatttagttacatttaagattatttttatccttttctaagaatatattttgtgggaatttaacaatgttcctttctcacaaattcattatgttgtagttacacttattagatatatgatcattctccaaaagtatgttatccattagcttttgtatgaaagtatatatatcttgagttaattgtgcccacgtgatcttgagtaaaactattactagaaaacataatcttgtgtttcccttaataaggacgctgcattgataactaaatttaattacttgacacatgccctagcctctagtcatcatatcattttaacttaccatttgcagatatgtgcactactcccctatcactttgagaaactcacaaactcgtgatttcttttaaaataagtccaagaataaagtaattaaaatttaagttttaaatttatcaacaacaatatatttattattaatttttttaagtaaaaaaaaaatctcacatattgactaaaaaatctcatatatcactctcattcttaaatataatttgtttctcaatttttattttaaatctcattttatgttaagttgaccttgcttcctctagtctctcgactaaccacaaaaacaaatcaatgataatgagcagcaaatcacgctccagaaaagaaagagaaaataaaaataaaaagctttgaagttagggtccccactccatacccggccggcacaaaatggggccttcaaaagtatcccaaatttttcgaattcatgcaagaaattttaaatccatcagtaatgtaatgtaatcttattctgcatgcattcaaatctgttctgcaccccattacgaggatttaggcccatatttaccagaaagttaatgcacaaggtctaatatcaataagttcaatagttagtccacaagacccaacacatctaactaacgagttcaatagttagttcacaagacccaacacatctaaaggattgagaattttttgactttatattaatttgaataggatccggagataaaaaaaaataattagtttattgtattttttactcttttttaatttttgacgaattttattcttattttttaatttattgtattttattctatttttaataaacttacaaagtttactctttataattttactcttaatataatttcactttttagtttttgaaaaattttgtaccaactttttatttttgacaaatttaattcctaattttttgttttgtttttttgacaaattttactcccaatttttgcacttattagtggataaatgatagagaataaaaatcacaaatttcttaaaaattgaaataaaataggtcaaattaaaaattggaggtaaaatttcctaaaaattaaaaagttgaagttaaagaatacaattaagtgaaaataatttacaatattttcataataaaaaaagatgtggaactcacaattgtttgtaatttaaaaaaaaaaaaactaataagaaaaaatatgttcaaaaaagtgtgtgaaaaaacaaatttaagcatatcacaccaagtataaataaggccctaatccatcaagcagtaagtatcaaacaccaagccaagcatgaagcatcacttgggcaccacttagggaagcctcaggtatagcctaaacctaagaaaattctattcgaatattcctcccattttggattgttgttgaacatttggtgtcatatataggaatgaaccaatgaatatcgttcacgttctgtatcaacccttctatggttttctgcatctactcaccatggatgaccacacgtcaaaagagccaaaggattcaatgctcaaagcaataataggaagagttgaatacaaaactgatgaaatcatggaatagacgtgctaaagaaccattaaaatcaactatgaacaggccgaacaatagttcacactatataaagttaccaagctatcggccactacaagaaagctataatgtttaattatgaccaaaagttgtctatatctataacgtcattggtaagacatacttttcttagataatttttttttaaagtatttttaaaagaagaaaataaaaagaaaaaaatgagatcaactcattttagttaatttttagaagttcactaatatagtttctctaaaagatgagaagacatctacaaataagttaatagaaaactcattttagtttatagaaaagcttatttcatttttctcttcttactttcttcttctagaagtacttctagagaaatttatattcaaacagatcctaagatcatctttcaaacaattgattatactttcttccatcttaaatataaacaatacaaaattattatattttgatctataatattttatttattgatattatctctaaagtatattttatctaataagataaaaaattatatttgatattaagttccaataaaaaataatttagaaaatatattcaattagttgggactcacacacttttaatgaaaataactaattttttaataagtgagaaatatgtcctttttgtttatagccgagaccaaagagagtagaaaataaggatgtgaataaatctttccaacaatcaaagaaaaccaactacacatttataagaaacatactaacactttcaagtgtattaattagtttttttatagatccttgattaatgtaaagttgattaatgaaaaatcattcatttcccatgnnnnnnnnnnnnnnnnnnnnnnnnnnnnnnnnnnnnnnnnnnnnnnnnnnnnnnnnnnnnnnnnnnnnnnnnnnnnnnnnnnnnnnnnnnnnnnnnnnnnnnnnnnnnnnnnnnnnnnnnnnnnnnnnnnnnnnnnnnnnnnnnnnnnnnnnnnnnnnnnnnnnnnnnnnnnnnntataagtattttagaataaaatttaaattcataaaaataataattaaaattaactagttggatttaatatgtttttttcctcaaatttaggttatttttgtttttgattgctcaaatttaaatttgtttttaaatgctatttttagtcccttttttatnnnnnnnnnnnnnnnnnnnnnnnnnnnnnnnnnnnnnnnnnnnnnnnnnnnnnnnnnnnnnnnnnnnnnnnnnnnnnnnnnnnnnnnnnnnnnnnnnnnnnnnnnnnnnnnnnnnnnnnnnnnnnnnnnnnnnnnnnnnttgtagggaatcaccctatgagctagaatccttcatcacttttccctaaaaaccttcaaatgggggggggggtgtgtgcatagtaattattgtgttttgttgttgggattgtatcttcctgatatgctcattgtatattggtatatggaaagattcgatcttgcatttcagtaggatattatacgcagatgattacaaatcatgtgcaagttggatcctaagacttttgttattatgttttagcacaacttgtgcaaagtattgaaattcaattgtaaataaaaaaaaaannnnnnnnnntttttttttttttttttttttttttttcattttggtcctccccgtgacatctcgctaacaacgtttgtgtggtgaatgaagtgtctctttttatccatgtggcccatctttgtttggtgagacttcatgaaattattcttcatccttgttttcaataaaatattgtcttttgagtcactatgcatgtgtgccagcatttatctgcacaatgcatattgtgctgattattgcataatgcataaatacagagacaggagggattaatttatattaaggataatttttttagagttattttttatttttatcattgattttctttaaatttaatgattataacaatttattcattaaattcaaaaaaataaataataaaaatgaaaagtaattcaaagaattatttttagtgtaagttgattcatcatatatatatatatatattattgattgattgcatcatgatcttctatgtttttgcataaatggcataagcaaagacttcacgacaaggaccaaattgaaaaaacaaaatgcaactacaaagatcaattgaattgacatgttttaaattacaagaggctaaaatggaaaaacagttacaactagggactaaaagagtattgaaatcgaaatcaatatgtatacaaatcaatattgcactcccaaattcagtgaaggtctgaaggatcatttctggcaaaatactcaaggcttgcaagggaggaacgttaaagcatagtggcaagtagcatggagagcacttatatggaaggtgtggttgtgaaggaagtctaattcagttaattgaataaaaatacatgagttgttgtaaatctatgaatattttttttcgattctcacatataaaaaaaatatagaacatgtggttgcagaggaatgttgttattttttaaggtaaagcttatgacattgaacagatatcgcaaaagtcattgtctatgacctggacatggcttaaggcatatcaggaaaaaaattctttcactttccagcaatggcaagtgaaccgaggaatctgtttgctgtgaaaaaagagggggtggnnnnnnnnnnnnnnnnnnnnnnnnnnnnnnnnnnnnnnnnnnnnnnnnnnnnnnnnnnnnnnnnnnnnnnnnnnnnnnnnnnnnnnnnnnnnnnnnnnnnnnnnnnnnnnnnnnnnnnnnnnnnnnnnnnnnnnnnnnnnnnnnnnnnnnnnnnnnnnnnnnnnnnnnnnnnnnnnnnnnnnnnnnnnnnnnnnnnnnnnnnnnnnnnnnnnnnnnnnnnnnnnnnnnnnnnnnnnnnnnnnnnnnnnnnnnnnnnnnnnnnnnnnnnnnnnnnnnnnnnnnnnnnnnnnnnnnnnnnnnnnnnnnnnnnnnnnnnnnnnnnnnnnnnnnnnnnnnnnnnnnnnnnnnnnnnnnnnnnnnnnnnnnnnnnnnnnnnnnnnnnnnnnnnnnnnnnnnnnnnnnnnnnnnnnnnnnnnnnnnnnnnnnnnnnnnnnnnnnnnnnnnnnnnnnnnnnnnnnnnnnnnnnnnnnnnnnnnnnnnnnnnnnnnnnnnnnnnaatttgtttttaaatgctatttttagtcccttttttatggtcaaaagtcatcataaattttgcatccaaactgcaaaaaaaatcagtcaagaggaacgagaaagaatactttttgaaattgagggactaaaatagaaaatttaaatttagagaactaaaaattaaaaaaatctaaatttaagggactaaaaatatatttaaatttaactatttttattggtttcaattaactaggcatttgtttctaatatacaagattaaacttaataatacattaaatcatgccataaaatgaagtaatttttgcctccccgtaacaccttttatgtaaatcctgctatttgttttttgtcctctgtccatgattgaatcattttgaataataaaaatttaaataattttttgacccttatatatagctgcaactacttttaacattggtttctatagtttaaaatatgttaatttggtctttataattgtgtttttttttttttttttttttttnnnnnnnnnnnnnnnnnnnnnnnnnnnnnnnnnnnnnnnnnnnnnnnnnnnnnnnnnnnnnnnnnnnnnnnnnnnnnnnnnnnnnnnnnnnnnnnnnnnnnnnnnnnnnnnnnnnnnnnnnnnnnnnnnnnnnnnnnnnnnnnnnnnnnnnnnnnnnnnnnnnnnnnnnnnnnnnnnnnnnnnnnnnnnnnnnnnnnnnnnnnnnnnnnnnnnnnnnnnnnnnnnnnnnnnnnnnnnnnnnnnnnnnnnnnnnnnnnnnnnnnnnnnnnnnnnnnnnnnnnnnnnnnnnnnnnnnnnnnnnnnnnnnnnnnnnnnnnnnnnnnnnnnnnnnnnnnnnnnnnnnnnnnnnnnnnnnnnnnnnnnnnnnnnnnnnnnnnnnnnnnnnnnnnnnnnnnnnnnnnnnnnnnnnnnnnnnnnnnnnnnnnnnnnnnnnnnnnnnnnnnnnnnnnnnnnnnnnnnnnnnnnnnnnnnnnnnnnnnnnnnnnnnnnnnnnnnnnnnnnnnnnnnnnnnnnnnnnnnnnnnnnnnnnnnnnnnnnnnnnnnnnnnnnnnnnnnnnnnnnnnnnnnnnnnnnnnnnnnnnnnnnnnnnnnnnnnnnnnnnnnnnnnnnnnnnnnnnnnnnnnnnnnnnnnnnnnnnnnnnnnnnnnnnnnnnnnnnnnnnnnnnnnnnnnnnnnnnnnnnnnnnnnnnnnnnnnnnnnnnnnnnnnnnnnnnnnnnnnnnnnnnnnnnnnnnnnnnnnnnnnnnnnnnnnnnnnnnnnnnnnnnnnnnnnnnnnnnnnnnnnnnnnnnnnnnnnnnnnnnnnnnnnnnnnnnnnnnnnnnnnnnnnnnnnnnnnnnnnnnnnnnnnnnnnnnnnnnnnnnnnnnnnnnnnnnnnnnnnnnnnnnnnnnnnnnnnnnnnnnnnnnnnnnnnnnnnnnnnnnnnatattaattaataagttgctctgaaatttttattatgacaatattaagtagtgataaaatcaagttgagtttcatttttttgtaaaggttaacttaatgactatgcattttaatttgtttgagtctcatattttagataaggtattgtcatatttttgctttgaaatttataatgtgatagtaccttatccaaaatacgagactcaaacaaaaatgcacagtcattaagttaatccttacaaaaaaatgaaactcaacttgattttgtcactacttaatgttatcataataaaaatttcagagcaacttattaattaatgctgtgcttattattatgattgatttaactaatacttgctttcctaaattttaagtatttattgtaatcttatgcttgtaattattaaaaaagggagaagatgaagattaaattatattttggatagtgttaacaaattccctgaatgtgtattgtgttgacaaatttgtctatgtcacataggatctttcaattaacggtaacggacgtaagataacggatggatgaatttgtcgcactttttttcactttcggggacaaaaatttgaattttcatctatctgagacgaatttgtcagagctctacacattcagagacgaaaatgactttttacccttaaaaacgagtagaagcatctcgatcacttatctcatccatctatacatcaaatactatagatatgtttgacaaaacatttcagttaatttttaacttttttttagtagctaaaaagtttgtttgactattcagtaaacaaactttttttagtagcttctaatatttcaaaaaatgttagctacttgaagtaacttttttaaaatgttagattttaactactagttttttatattttcttccatttttatctttaatatatttatcaaattttcttattacgctttttaaataaatcatggtcttattattttttagtcattatacacttttcaataatttcaacagctatttttactggacatttgtaatataggcttgaacatgttagtgttccctgatatataaccgaatttgatttttacttcctgataaaaaaatttcttcatttctgcaccttgatatttgaaattgtttggtttattagcatgatccgttaagtgttgatgtgtatgttagtttaacatgccagctagctaagtgttgagtcaagttggattaaatgtgacgtgtaaacgatgatctgtataatgacatggatgtcaataattaataaattaaaaatataaaaaaaaacaattcttttctccgcatccctaccctctgtttcctccaacaaccacatcaacgacaccatcaatggagtcctcgacagcaccactataataaccatgaaaaaaaaataaagatataataaatttactatattccgtcacaaaaagcgttagcgacggaattttgcaacggatttagcgacggccagagagtggcgccgttagcgtgagaattggcgccgttagcgtgggaggtgtgctagagtggcacggttagcaccagaagtggggccagtagcgccagaatgcaccagaaagctatttctctcaaataactggcacgattagcgtagtaatggcgcgattagcgcgggaactcggtcaagacaagtataaaaggcccatttcgcgatttctgagggccaaaagccttcatcttcttcctccaaccattttctgccattgagagctttgaagcttcataccaccttcattcttgaccaaaacacttcccttcaaacatgaaacttgtagggaatcaccctatgagctagaatccttcatcacttttccctaaaaaccttcaaatggagagatccctttctctaggaaacttcacaaaactcgagctcggcgaggaaaggaggcgattctcggacacccaagcttggggaagtggtccattagccttccttgtcatcttagatgtaagaaacttgagttttaccgtttgatttgtgaatttgtatttgggatgaatagtgacccttttgagctagagcttaaattgggtttgggtcctttagaaaactatgtttagtaggttgttgtgatgaaggattagctttgaaatgttagtttcacggactttggttcttggctctgagaaatgcatgtgtaggtagtctgttggttaattgatgattgtagaacatgcatgagccttgttactggtactatatgtgctcaggaagatatataaatggtgcttttgtgttgaagaagtcgtttagccatgttgttcattgttgaactttgggcttgtatagctttgatttggttgattctataaccttaagatagaggacatagaggtttatatggaaaggaaggatgttcctttctttgtaacggttgaggaccgttgttatgtgcttttgccttatatggttgtgttgatgattgattatgcatgtatgccttgtatagggcatgacaccgagggtgtcagtggcgtataccaccgttctgaggttgaactgcagagcacggctttgccaagtaagttcttggtttcttgggagtgtttcccactgcttgtgttccaccatactccaagggagtaatggttacatacatgatgcatgtgcattgaattggttgttacagtttctcatgatgatatgtatgcatgattctgtgctttatgtatggttatctgttgaatagatcttctggacagttagatagatatggacctccctaggagaagagcgcacctcctaatttggtttgctcacgtaaagggtgacgatgatcccttaagaccaagagataggtggtcccgtcgcggttgaagcatattctcggaggtgccatatacgtgcatccatgcgtaaggggtagctcccgatgggatggcacgggtgtgagttccgacctcacactgaggactgagagtcctgatgctgatgatgatgcatctttggcggcgtagtttcgcagatatacattagagctagatgattggctatgtattgttgtgagggtcaagtggccagtgcttgtgatgcctttgatgacgtgtgtcatggaagtgagccagggagaaggagaagcctccaagagccctgagcttactgagatgtgtatctcaccccgtgtggggattatgtttttgcaggtgactcatctggcagagatgatcagtctcaaggcgggaggccccaatagagacagtcttatgtagctgcttggtagcatttggagagcttggaggctcagtgtgttgttttgttaatgtatttgtacccctgtgaggggagatgtatgtaggtgcacacctattatggatatgttttgatatatggactgtatatgactgtatgccctcgtgtgaggaagtgatctttgagatcagagcatttgatgcttattcttttgtatagacactgttgtcttgatgatgtatattcttgtggatttctcctaatatatctatagagatattgattatgcatcgtcgttgtttatgttgctttggatcaatgaggctggcttatgtttatgatgagtaccatacataatgaatcaagagatatggtttcgaaaacacttccgatagttttattaattgattaaagtaattactgcgcttatctgataaaataattgttaatacaccagatgcatacggggtgttacaaccaccttccttgcttccaactccctttcccccctccttgaactaacactctgctgccagcatcgtcgcaagattcatacccaaacctagaatggtgatgtcggcatggtcaagaacgccagggtgtgcccttgaggttgccatcgccgtggagggcagtgactcgtcaaccaattacctttctcttcgactcaaaactgtcgtcagcaaaataggtcgtggcaaccaaaagagtgacaaccgccacaaccatcacaacctctttcacccctctacacatttgatgtgtgtgcgagagagagagagagagagagagagagaatttaagtgagtgagagagagggtggatctgagaaagagaggatttgggttccaaacaaggtctatgtctactgccacaggacaatctctagctagtcgccacgaactccacttgttgctgcgaacaatgatggcagatgcccagaatctggtgatgggtcaggccgaaagctcctgcaaatcctttttgtgtgtggtgtcttgattttatttgaaaatttggggttgagttgtgttttgttgtttgtgaacagaaatgtccagcaaggatgctggtaatttaatgttggatcaagctctctcttaaggtatttacatgaaagaaataccttcagaagacgatcactatgcatgaagcaatactcaaccagtggggtgaggtgtgtgcacagtgtgaatggaaataagagaaaacgagaatatgcgtaccttttcctctgcaactatcccttatttgtacttcacttacctcttggttagttgtggatttaccccgataatcacggccaagatctctaaccgcttggtattacaatctctgtagttgacaaggtccacgatctacttttagttagggttaacaatccattattcctgaatggtccccaataatcacttaaagattttgatgttcaattcctcaacatcaaaggtcttcccaagtcccaagagatgattcactatgtgtgtgaatcttgtttggagttgagagatactttcattttgattcatcttgaacatctcatattcatgtatcaatgagtgttttcttgatctcctcacctctttagtcccttcatggatgatctctagcatctcccacatttctttggcactagtacatctaactgttctaaaaaattcattagaagaaagagtagaagttatcatattcttagctttaaaatcatactgaacaatcctcttttcttcatcattcatctcatcccaatctttgggaatcatgttattatcaacaactttgattggtaccctaggacctttttcaattgcattccatgcacccggatcattggcttgaataaagatattcattctatttttccaaaaactgaaatgctccccttcaaataaaggaggtctatttaaggaggcaccttccttgaaggttatttgtgaagtattcatttgaaagaaagtgatcttgagtaactttcaagacctagctcttgatgccaattgtaaaatatgggaacacttcacacttaaccaagagggggggtgaattggttagatttggtaatttaaaaatttctttgaacaaaatcagagtttttccctttggatctttatcacttttgaaatcaagaacctttattcaatctaatgctcaacccaaggtatgcaatagctcaagaactttgttgataacaaacacacaatcaagaataatagaatataaccaatataaagaaaataaacaacacacaaatatgtatactggttcacttcaaacactatgaagctacatctagttttcttccattcaacactagaatggagttccactattgcaattttcagttcttacaagtttttacaaagtctctctttatcaaccctagataaagttcagaaatctaaaacattattagattcttagagacaacccactgagaacactgctcagtatatcccctagagaaactctatctctagattacaagcaagaaacccaattacaatagtcaatcaaatacaaaattctcaaaagaattacaacctcaaagtttaaggaaagaaatcacctgatgatccgatgaatgatatgcatatgaatgaacaatcagggagaattatgaaaacaatcttcagaacatcactttccttatcctttgaaaagaaacttcttgcttcaataatcacctaacaacccataagtatttttgtgaacgcaagaactcaatgaacccagaaaaccactaagagaatgtttagaaagcctttgaatgcttagaatacgtattgatcaagttagtaaaacatctgagcaagagttctatttataacaaactttataaccgtcagtaatcgattaaatacgctcctgtaatcgattattttgcttatgtaatcgattatttcaagactgtaatcgattaaactgttcaacaaatttttgggtttgagcaacgaacaaaataatcgattattccgacttgtaatcgattacaccagacagttgcacaaaaaataaatacactgtgtaatcgattacaaactctggtaatcgattaaaccaggaacctgtataaaactgttttgaactatgtaatcgattacagcatttggtaatcgattaaaccaggaacatgttaagtatggcatataatgtaatcgattactattactggtaatcgattatgacaggaaggtgatatattttgattggcctatgtaatcgattacagcatgttggtaatcgattaaactgttcattaaagttgtttataagaaaactaaggtaaaataatcgattatttcgatacgtaatcgattacattgttcttgaaaagttttccagaaagcaccaagaacaagataatcgattcttttcttaatataatcgattaatctagtagaaaactttatttttccaaaaactcttgatttatttcaaaaccttagacaatttatcaaagccttgtaaattcttttactcaagttaattcccttaatgaatgatatgaatgcaatgcacttggatcactagaaatgctttcttccttttacattcaatcacaaattaatcttcaaggcttcaaggcatattgaaagttcaaaaccttccttcttgaatcaatgtatgctttgtgcttcaagcagctccccctgagttcaacaatctcccccatgttgaaagttcaaaaccttctttcttgaatcaatctatgctttgtgcttcaagcagctccccctgagttcaacacatcccaacaactggtgttttatccaatcctttgtacttttctgtcagcatttaggaattccttgtacaattcgccttttcttttattattttactgtacataccactaggacgggtagggaacctcccaacaaaaagggatgaacttccatccgaggtcattcggaccgtaaacaactgtctatacagaatcgtttaaacatttcaagagcaaatactttaaggttattgtcgaacccggcaaatagcctttctttctttcctcccggaatcccgagatgtggagtggaagtttccacactattggacccatattcatcacgaattttcatcatcctcttaccatttcgaagaaacggacatatcagattccgacgcttcgtcagtgacccggattgcggcatatagggaagcacacgaactgctaaatattgcttcttatattcgtaattatcattctgggttctccattgaattaagtatggacatatctgaatttgatttgtaatgtataatttaatccgctttaactattttattttcgtttggagctgataatatgggatcacaacccattgctccagctccaactgcatctgatgtggccccggtcgcagattctgctgctctgacggttgttccggtcaaccccgctgccaaggtgaaacagtcgcccatgaagcgtgccaacctcgccaaacgaccacagcccggttatcttagctacattgggggaggtaaaaaaaaagaccgtggatgtggctcagttgaaagtgaccccaacagaccaaagcaccccgacactgggaactgcgtcttcccaacctccccctccactccgcacctctactgttcctccttcggccacagcttccggaccgggtcgcctttgggagaaaggagttgatgaggaagtggttcgcgttgtcaaggctccaaagcgcttcgcagatttgaactctcttttccatgatgacctgaaagagctcagtgtcatccaagaaaatggcttgaagtgtgccgccttggttcaaagtttagccactttgaagactaggcaagacaagctattggatgagctccacgcatcacgtgaagagactcaaaaaacccatcaagagcttcttccctcacaggatatcacggcctccctccgccaagaactccaagctacgttggatgccactgagggtgcccagttagctttggaaatggcccggaagaagcatccactcatgactgggcactttaatgaattgaagactgctttggaaaaagcccaacaggagcgcgaggaggctgtatccaagctgcataaggccgagatggaggctgccgagatgagggaagtcttgactatgacggttgacgagtccttcaacaacacactggaccaaatacgttatctgaacccgggacttgagctgaataccacaggcatgcactttaaagcctatgtggatggccacaaaactgatccctccatccccttgtgaagattcaatcatcccgatggatgaggatttgccgcatggagatgaggtgacttctgctattcaggctcaaacccggcgacataagtgtgtgaagggccgggatgctggtttaatgacttataacttttttatttttaaacctttttaaacattgccaggttcagtcccggcttatttgtaattgacaatttattttcatttgacgtatttgctaacttcgtcccaatacgcctgaatccgtagtaattcaaattcttacaaaattatttggccaaaacatccttcgcgcgcggaataaatattggtttggttccaacaaccaatcgttgtataatacatatcacttttctttaactttgtccgggttatgtttcccagattgaatcctgacaatgattaacatgctatatgtagggcatgacttagctatattccctacattccaacctaatcagggtttaagtagcacatcaatcattgccgagatattattgatcacggtacctcgtaaattttattaacttctatgcaactttacacatatgagtttacgatcttttcgtaaagatccaaaaaatttcataaaacgattaataatcgaattatatgacaactcatgctttcaattaaagagaacaatatgaattccgggttgaaagctttattgcaccgcggttcatactctcgataaacaaaacataagttataaatgaaattgttagttccatcataaacgattaatcaattggattacaaaatgattcatgatctcaaagaaagagaaccatatgaacccgtggttgacaacttattgtacccctgctcatactctcaataaaagagaaatacacaaatcacattacattgttaattccaacatggaaaacaaattcttcttttgccatatggcttattgctccttccagctatcctggaacaaactgtaatatatcttcaatttgtccgcattccaagttcgtttgatggcttttgtcaagggtttccatcatgtaagctccttgtctgagtttctatgcaatccggtatggtccctcccagttagctactagcttcccctctcgaacatttttatttccgatatccgccctacgaagcactaggtcgtcctattcaaaacacctcggtttaactttcttattatacttcacggctgcttgctgttttgctagcaaatcccgggcatgagcctcaactcggatctcgtccgtcagattcaactcgatggccagagcctcattattctctccttcacccttctgcaatacatggttgcgtctccaagataactgaccaatttccactggtatcatggcttcgcagccataggtcatttgaaatagagtttccttggtagacgtttgaaccgtggttctgtgtccccacaatacacaataaagttgttccacccaactcgagctggcatcgtgcatccgctttcgcaatccttcaacgattactctattggctgcttcatcttgtccgttagactgcggatgttctactgaagtgaagtgatgcttgatttggaacccgaccatcatttcctgaaaacgtctatcagtgaattgagttccattatcggctacaatctcacctgggatcccgaacctggaaataatgtttcgttcaaaaaatctctgtactcgagcagacatgatggtggcgagaggttcagcctcaatccactttgtgaagtaatctactgccactattaaccattttaactgcccttccgctgctttgaacggcaccaacaagttcattccccacttaaaaaagggccatggcgctgaaataagttgcaactcggcgggaggggaccacagcaacctagcatgtttctgacaactttcgcattttctgacatgagttgcagagtcagcttccattgtcggccaatagtatccggctcgcaaagccttccttgctagtgccttagcacccatgtgttggccgttgatgccttcatgtatctcggtcaacacgtactcaactctatccggtttcacacacactaaattagggcttgcagtcctctgcggtagagttcatcatctattattgtatacatggctgcatcatgtacaagtttctgggcttccatcacgtcgttcggtagtataccccttttgagataatcaatcatcggctgcctccagtcttttgtcgccgagattatcatcacacaggttggtctagaaatttcttgctgaatcacggtccggtggttacccgggctcttggtacttgctaatttcgacaggatgtcagcccttgcattttcttctctagggatatggctcaccattacgtcatcaaaatcaaccattatctccttcaccttcgtcaaatatttggccaacaacggccctttcactttgtagcgcccctcgatctgggctgtgacgagctgagaatcggtgaatacctttattttctttgctccctgttccttagcctgtagtaacccggctattagtgcttcatactctgcctggttattcgatgttggaaaatttaacttaagagattgtgatatagccaccccttccgtattttcaatgatgaccctggctctacttcctttcatgttagatgatccatcaacatacaacttccaacaattctccgtatctccaataaccagagttagttccataatgaaatctgccaaagcttgggatttaatagcatgtcggggttcatatttcaagtcaaacttggacagttgtatcgcccagtttatcatcctcccagccaagtccggcttgtgcaatacttgccgaattggctgattggttctgacaacgatcgtatggctttggaagtaagggagaagcttatttgcggctatcaacaaggcaaaagcgaccttctccagcctctggtaccgtagctcaaagtttcagagggcctggcttacgaaatagacaggtttttgcattttggaggcttcctttaccaataccgcgctaaccacttcatctcccactgataaatataaaattaatatctccctgggctctggtttcgacaacacaggtggggaggctaaacatctctttacctcggtgaatgcagtctcgcaattcggattccatcctaccacggcttctttctttagtagcttaaagaaagggagtgccttctttgttgattttggaagaaagcgcgttaaagcggccagtcttcccgccagttgctggatctccttttgacttgttggaaattgcatatccaagatggccttacatttatccgggtttacttcgattcctctatgggttagcatgaaacccaggaatttcccggccgaaaccccaaatgcacatttaagcgaatttaagcgaatattatattctcttaacctgccaaatgtttcttccaaatcttttatatggtcttctatagcggttgtcttcacgatcatatcatctatgtaaacttcgatatttcgaccgagttggggctcgaagaccttattcatcatcatttggtatgtggcccctgcattcttcaacccgaaaggcatcacattataacaatagtttgccttgtcgcctatgaaagccgttttttcctgatctgccgggtacatggctatctgattgtatcccgagtaagtgtccataaatgacagtaaccggaacccggacgagttatccatgagttggtcaatatttggcatcggataggcattcttaggacacaacttgtttaaatcagtgtaatccgtacatagtctccatttcccgttagatttctgaaccataactacattggataaccatgtggtgtattgaatctctcgtataaacccgacttctagcaactctttgatatgtgtggccaatgcttaagttctttcagggctgagcttccattttttctattggaccgactttgatccggggtacatggataatttgtggcaacaaaatgtcggatctatgcccactatttccgatgttttccaagcgaacatgtcctggttccttctaagacattccatgagtttgactttgatgtttgtatccaccatttttccaatcttagtgatttgacacgattggtctcctatctgcacttcttccacatcttcagctgatttggtctccactcttcagaactctctctcatgtcgagctccaccagctttattagctttcccgactgatgttcacctatttccctgcccacttgatcccactggcatatccggggtggtgaagatgtgccgcctttgcttttcctaacagtgttatagtaacattgtcgggattctttttgatccctgcggattgtcaccacctggtccttgttccctacaaattttaacttctgatgtttggtagacattagcatgtcccacttatggataattggtcttcccaagataatattgtatggtgaagggaaatcggccacaacaaatctgactctctccgacttgaacgcatccttggttcctaatgtcatccgcaaatcaatagagcctttaagactggtatttcctccgttgaagcctatcaatatcgtcttacaaggcttcaattcctcctcgtctaaattcatctttttgaatgcactccataagatgatgtctgccgaactaccattgtctacaaacattcttttaactcggcaattggtcagcgttccagtaattactaggtcatcctcgtgacccgacaccatatcttccatgtcctccttcgtaaaatataaaagaggaggttccggcccgctagctttccccttaaacttaggctgctcccttactggaagaatttctttcaagtactttcgtctctgattggcggtgtctcctcctcttcccaaggctccggatataacattacattcgaatttcggctcttggaactcgtcgtcatcgttatgtcttttctttttgtcttctttttccttcccgggttgggcttcttctcccttgcacctgtttctgcggccctgagtttttatcacatactgtatcaaccttccttctctgacaaatttttcgataacgtctcgaaaatcccaacaatgatcagtggtgtgtcccggtccattatgaaattcgcagaaccgagatttgtccacgctggccttattgtacaatggacgaggccgctccaccttcttcatgtctgtcaacactacctccctccaaacttgtgaccgggatacattcagtggcgtatatttttcatacttgttttcatacttccccagtctgaatttggactccatattcctgccttgatttggatttccctggtgttgtcgaccccttggcaatgggctcctccttctaggactcctttccttctttctgcccattgcattcaccgggtctttatatatggctttcgcaaatcgggatgatccatttaaccctgctgaaatgaggtaaacctgaacttgcttctctaatccttgtacttgcaacactgcttctttaaaatgatctagataactctataacgtttctccgggttgttgtcgtatcttcccaatacgaactcggacttcggttgttttttgctggtcgcaaaattcaacaaaaacctctggccaaaatcttcgaagttacgaatcgaacgtggaggcaaggtatggaaccatgtctgagcggctccagtcaaagtagtgacaaatctgagaaattatcggctcatcaattcctcgaacacacatctgcatatcgaactcatcgatgtgcacttgcggatcctgagttccatcatactttgacagaaaggaaccatcgaaatcatctagatatcgggcattaactatctcgtcagtgaaaggactattgttatgttgtcctctactgtatttcctctgatatactccttcttccctcctcatccgagatgtagcttcaactacaggattctggtctttcgcccggggctggagtgttggctgcttcaccccgggattgattggttgatttggaactaccggatgtgcattctccacgttattattgtcgtgacgcaccgggttgtcattccgaaggttcactcgagatgatcctccaatttcaaatcggctaatcggttcttctgaattaccgagataatttgcgggaataaccgggacctgatgggcctggagactcgtctcgttcctagctgtgtgactgttctgacgtccatggttctcgttatggtctaagttctccacattcctgagacgttgttccatgcgttgaatgcgttgttcctcctcacgtttccattcttcatttcgttcctccatccggagcgtgatgtttctaatgtcctcctgcctttgaagagcatatcttttctcatactctcaattcgagccagaatcaaattgagagcgttgctcaataatcgttcaaccggttccgattcatgggccgccgtagccactggatgatgaaccgggttgggttgatgagcatcactaattactcgtcccgatggagcaggagacgagactgagtctgaaattgcatcagtcaagagcaaatcttcatgatgaacaatgttctgaatgccaggtggtaattctcttcttcccggcacatcagaacgtggtggtagagactagttgcttctggtgttaattatcatgaatcatgggatttgaaatttaccttttcccacagacgacaccaatgttctgttgtttgtgaacagaaatgtccagcaaggatgctggtaatttaatgttggatcaagctctctcttaaggtatttatatggaagaaataccttcagaagacgatcactatgcacgaagcgatactcaactagtggggtggggtgtgtgcacagtatgaatggaaataagagagaacgagaatatgcgtaccttttcctctacaactatcccttatttatactgcacttacctcttggttagttgtggattttccctgataatcacggccgagatctctaaccgcttggtatcacgatctctgcagttgacaaggtccatgatctactttcagttagggtcaacagtccattattcctgaatgggccttatctctaagcccatttataaaatccataacaagttgtttgtgcttaatctggaaattttgcgtgtttgccatgacagagaagttttggaaaagagaataccaatttctggcggctacaagctgccacaaatcgtttaatatatttcaaacaagttttccaaacatttaaccgtcaaaaaataagctccatttaataattaaaaaaattacacttgttacattttatctgatatggcacaataagtaaatagttgatgtgtcaaactaacaaacacatcaacaattaacatagtctactaatggtaggaacataaatcaaaacttttcaagtatcatagaacaaaaataaagaaaaaaaatatcaagaagcaaagttgagattcgggtatatatcatagagcattagcatttttaagcctataatttaataaattaatatgtctaactaatttttcacatttcaactaattttttaactaattttatcaaaataatccataaaaatctgaaatggtttatgccacctacccaatttttgttttggaaattacttcttttacggtttccaccgagttttctgttaaaaggattgcatttgcagttcaatatatataaaaaaagggattgcatttgcagtaattaaggacccttgactttttcatattggaggagtaaaagtagttgacaacataaggctgattttgctttggttggactcttgcaacataatattttttttatgtttgtgactcaaaatgtagaaagtatttaatgcttcataatctttatcattaacgttatgtttggtaaaattaacaaaaaagttaattgataattacaaatcaattaaaagttgaaaaaatattttattaaataataaacgtttaataaaatcatatatttaagtagttgagaaatataaaattacataaagataaaaataataaaattctaatttgaatagaaaaggttaagattatattcagcaacacatttcacctagtttctatatttttttattgaccgaaaaatttgtttgtttgtttggttgctcaataaataagttttttagtaacttctattgagacgttacttgaaactaatattttaaaaaatatttcttcaaataacatttcaaaaaatattaaaagctaaaaactaactcgaatatcttatccaacataacataaatccatctaaaagtgaaactcattttgttgaggaaaataattctaaatttccttttaaaatctattataagtatttttcatatttctaaaatattaaatatatttatttttcatctattaataattttttataaaatattgaacacatctttaaatatatattttcatttaatattttcttataaatatttaaaaagttataagatgctaataatttgtgatttgagtcaacatcttgatctaacatataagtcaagtcttcgtgctgatgagggaattaaagaacttaaaattcaagttttcattggtcactttaagtacatcccgccgaggcaccttggccactttttggaaagcagaaagttgctttttggagatagcaacagcatggcaattttcgtactgtataaaagtttactcttctaaatctttacttttgcctttttttgactaattaagataagtgtgttttatcttgtcaaagttcatgcgccaataaattgtcactgttcataaatataaatagaaagttcaaagctatagctagctagcttaattagagaaaaatttagcttactccaaactttaatttacttctatttttattacaaattgtgattaaaattttgaaatgataagatcatactatattaaatatcgttctttttttttctcaaaaaataaaatccttcatgatgtcgttaaatactgttgaccttatcacccgcatcataatataagtaatttacttcatgatgtggaaaaaaatgcagctaaaaatttagtggaagctatagatatcagcttttcgaatttaaattaatatttcaactaggtagatcagtgcagagggcgctttttacgacggttcttttacccctacgacgacggttcttgaaccgtcattgttgcgcgtgtcgttaaaaatggggtacttttgacgacggttcaaacaaccgtcatcgtatgtatttttttattttttattttttaaattaaagacctacgaagacggttgtttagaaaaaccgtcatcatatggcaccctacgatgacggttttctgtaataaccgtcttcgtaggtctttaacttcaaaaatttaattttatttaaaaattaaaaacctacgaagacggttatttagaaaacccgtctttgtaggtcaccctacgatgacggttttcattaacaatcgtcttcgtagtatttaattttttaaaaaaaaatttgaaaaaaacacctacgaagatggttataatcaaaaaccgtcatcataggatgccctacaaagacgggttttcttaataaccgtcttcgtaggtgttttttcaaaaaaaaatttttaaaaattaaatactacgaagacggttcttaacgaaaatcgtcatcgtaggatgacctaaaaagacgatttttctaaataaccgtcttcgtaggtatattaaatgaatttagtttttttaaaaattaaatactacgaagacggttattacgaaaaaccgtcattgtaagccaccctacgatgatggtttttctcaataaccgtcttcgtaggtatttatttcaattttaattttttaaaaataaatacctacgaagacggttattaacgaaaaccgtcatcgtaagccaccctacgatgacgatttttcgtaataaccgtcttcgtaggtagtttttaaatattaattttattttataatatatacctacgaagacggttgttaacgataaccgtcttcgtaggtagacttacgatgacggttttttgttataaccgtcttcgtaggtttttaatttttaaaaaaattaaaattgaaataaaaacctacgaagacggttatttaccaaaaccgtcatcgtatggcagcataagatgacagtttttgtaataaccgtctttgtttgtttttatttcaatttgttaattacttttttttttgtaaatgcatctccaactttttttttcgaaaattgatttctatactaccaaatgactttaaaaaatacaccacattgaagggattttattctataaaataaataaaaaactaaattgttagtacactaaaatttaaaatttagcttaacgctgtaaatttaatttaacacaaaattaaataaaataccatgcaacaatatgcctacttcagaactttcttcactggagttgagttcaattcactgacctgcccatgaagatgcccataatgcaacccccaccaccaggaagtaaaatacaagaatttttcatagaccctgcaagaatttttcatcatcacatagaaatttgtaaaaacttcaaactgtaaatatgacaagagtgttgaagccatataaatcaaattcatatggaattatatctaacatcaggccgaaagcacaatattagaaaactaatatgcatcaacaattaatagcttcctttgattttgcattctttttggcaatacaaggtttactatgcagtcaagcagcatagtaacaattaatagcttcctttgattttgcattcctttgattttgcatacaaatgaaattaattcaagctagcatcaacacttgatgtgagcaatgatctttaagctaatttgctattatcatttatgtcattcatccaggcaatgaatcagaagcaatcactaaccatttgtatgactaacaccaagagcaacaagcacttccaggtttgttgggtcagcctcctgtgcatgcatcattgctgcaatagcctgtgtaagtttaagaagttttagaacagttaaattctaaagtnnnnnnnnnnnnnnnnnnnnnnnnnnnnnnnnnnnnnnnnnnnnnnnnnnnnnnnnnnnnnnnnnnnnnnnnnnnnnnnnnnnnnnnnnnnnnnnnnnnnnnnnnnnnnnnnnnnnnnnnnnnnnnnnnnnnnnnnnnnnnnnnnnnnnnnnnnnnnnnnnnnnnnnnnnnnnnnnnnnnnnnnnnnnnnnnnnnnnnnnnnnnnnnnnnnnnnnnnnnnnnnnnnnnnnnnnnnnnnnnnnnnnnnnnnnnnnnnnnnnnnnnnnnnnnnnnnnnnnnnnnnnnnnnnnnnnnnnnnnnnnnnnnnnnnnnnnnnnnnnnnnnnnnnnnnnnnnnnnnnnnnnnnnnnnnnnnnaaatgcctagcaaaattgaacattaaaattttatcagcagattacaccattaaaatagcttaactgtgtttatgcaagaatgtcaaacatatacctcaacactggtagtgtagagtccaccagcaaacttctcaagctcacttttcttaccctttatgacaggaactgccaaatactcttcgtatattcgcctatataattccagaatctcaagaacctgaagctgagacagtgacttgcaatacacagacaacttcagacaacgccaactgctaaggcaacggtagcttgaccaaaaatgcgtattgcaggtcacaatattcaaaattcagagtttacacaacttgaaaacataaatatgagagtaaacctacaatgtttgcttctgcagtcggttcagtacaacaagtctcctcaataaagttcaaggatgtcaatttcacattaatagactcaatactaaattaatttgcatataaaaatatagtgagaaatagaaaagtaaagacttctcacatgttcaaatttagacacccaaccatttgcaccatactgttgctcaaatgagtaagcccaagaatcgggattatcatatttctccctttgttgactaaactcagaagtgcatttacctgaaaagtagttacatgtgatgagttcggagtcaagctatcaagcaaaaataatataggcaaagagaacattttattttaggaaaatgtaccaaaatatctgagagaaatcattattgatcacatgtacattgaacacatcatcactccatatgctttataaaaggaaaggctggcatactctagagtaagagcttctcaaatttctgagtaagattttagtgaaggtataacttgacaactgatgctaatagacctttgactgagtaaaataaaatgtcagccaaaatgcatgaagaaacaggtacagtacaagagcaacaccaattgcacataccccaattgccctacaaagaagaaaagatcagaggtctatagatggacaaattactgagatggtgtataagggtatgtcagcccctggaagtagaacagttagataacctagagttgtagttcagactaccagtgacattgatatcctagatgatggctatagatggagaaaatacgggcagacagtagtgaatggcaatccgaatccaaggtaaaaaaagaaacaccctttaggtcttactgttgtccaactttttcaaagattgtatattttgaaaaagggaagtgtttgacagatgagaggtggttacattattttaacagttgagaacaatatgaattgtttcttgccaaaggacaaacgtagttagaacatagccaacatgaaagagaaacataaaattcattaatttatcataattaaaacaatatatcaaagaacaaaatcaaaaatgttattttattagggactcaacataaaacgaaaatttattagggagtaaacataaaaatcaaatatttattagaaattaaaaacatatttaagccttaaatttataattatatagtaggtgccaaagaattccaagaattttctttttctttgatcacttttaatttctcacagatatggaaaggttatcaagacctttatcctggggaggttcactgtcttcgtgactgggagagaagcaagtaagatactgttaaccggaaaagatgggattgtgagtttgaatctgttttacattggccagcaagttctaggccccacaagtttgctgcaaaccattggagaggcacacaaaaggctaagaagactgattggtgaacctttatcaattgatggcctgaaaaaatatttccattttatcaacacgcaggcaatggaaacattagatcaatggcaaggaaggaaagttctggttcttgaggaggcttctacagttgagtgccactaagttaaaaaaacaaccaaaatttcatatttggttatacatcttgttccatactgacttagtatttgaaattttgaatgtcatagtttactctatgagatgttagattctataatttcacggaggagaagtggccaataatatcaacaggatttcttaggatcattagttatgaaacacagaaaagaagatggagaagcagatgaaaataaactcacagatcagcaattgagggataatatcttaactctgctggttgcggggcatgataccacaactgctgctcttacatggctcatcaaatttcttgatgcaaattcgattgttttggaataactgagagtaagtattaaagacactataatctttctcctttccgtggttgaaaattgtaaaatgtagcttcatgaatgatgatgttttgtaggaggaacacagacaaattgttcaaaacagaaaggttggaacaggtcttacatggtctgaagttaataacatgccttacaccattttgctttcacacctaaatagacagatttctcaatacctgcacatccttcatccaccttctaagttctaagcagcaacattttgctttcacacctttgtcttatcacgtatgacaaacaacattgttgttttgtgtggactaaacaatctcatcatgacctgaaagcaaatacaagcatgcagttatataaataacaaccttttacattggaacctattgcttgtaatcagtaagtagttgaatgatacctgaaacactgttttgaacatcatggtgcttatatatatatatatatatatatatatatatatatacacacacatcatggtgcttgacacagttgtgttatatcaaagtcttataacaactttcaataaccataatgtactaggggataaccaattaacatgcatgcattatatgtaaaataaaacaaaagaaaaacctctagataggtaggattttgcaatgctgcacatgcagaaatttccgcagcaacagatacattatatggcttctttgcactccaaagatactgaattacactcaaaggaaaggctccatatcccactcgaattaaacctgagacagtttgaaacttaagaatttaaaggaaaggcttgtgactcctttctcaagttttttgccacagcttggtaccttttattttctctccttgttgaccactactcaaatctgccctctttggttcaaatcaatgcaatgtgggattgtagaggaatcatcttagcctcatgactttcccattgaaatcagcctggcctaatggctatcctnnnnnnnnnnnnnnnnnnnnnnnnnnnnnnnnnnnnnnnnnnnnnnnnnnnnnnnnnnnnnnnnnnnnnnnnnnnnnnnnnnnnnnnnnnnnnnnnnnnnnnnnnnnnnnnnnnnnnnnnnnnnnnnnnnnnnnnnnnnnnnnnnnnnnnnnnnnnnnnnnnnnnnnnnnnnnnnnnnnnnnnnnnnnnnnnnnnnnnnnnnnnnnnnnnnnnnnnnnnnnnnnnnnnnnnnnnnnnnnnnnnnnnnnnnnnnnnnnnnnnnnnnnnnnnnnnnnnnnnnnnnnnnnnnnnnnnnnnnnnnnnnnnnnnnnnnnnnnnnnnnnnnnnnnnnnnnnnnnnnnnnnnnnnnnnnnnnnnnnnnnnnnnnnnnnnnnnnnnnnnnnnnnnnnnnnnnnnnnnnnnnnnnnnnnnnnnnnnnnnnnnnnnnnnnnnnnnnnnnnnnnnnnnnnnnnnnnnnnnnnnnnnnnnnnnnnnnnnnnnnnnnnnnnnnnnnnnnnnnnnnnnnnnnnnnnnnnnnnnnnnnnnnnnnnnnnnnnnnnnnnnnnnnnnnnnnnnnnnnnnnnnnnnnnnnnnnnnnnnnnnnnnnnnnnnnnnnnnnnnnnnnnnnnnnnnnnnnnnnnnnnnnnnnnnnnnnnnnnnnnnnnnnnnnnnnnnnnnnnnnnnnnnnnnnnnnnnnnnnnnnnnnnnnnnnnnnnnnnnnnnnnnnnnnnnnnnnnnnnnnnnnnnnnnnnnnnnnnnnnnnnnnnnnnnnnnnnnnnnnnnnnnnnnnnnnnnnnnnnnnnnnnnnnnnnnnnnnnnnnnnnnnnnnnnnnnnnnnnnnnnnnnnnnnnnnnnnnnnnnnnnnnnnnnnnnnnnnnnnnnnnnnnnnnnnnnnnnnnnnnnnnnnnnnnnnnnnnnnnnnnnnnnnnnnnnnnnnnnnnnnnnnnnnnnnnnnnnnnnnnnnnnnnnnnnnnnnnnnnnnnnnnnnnnnnnnnnnnnnnnnnnnnnnnnnnnnnnnnnnnnnnnnnnnnnnnnnnnnnnnnnnnnnnnnnnnnnnnnnnnnnnnnnnnnnnnnnnnnnnnnnnnnnnnnnnnnnnnnnnnnnnnnnnnnnnnnnnnnnnnnnnnnnnnnnnnnnnnnnnnnnnnnnnnnnnnnnnnnnnnnnnnnnnnnnnnnnnnnnnnnnnnnnnnnnnnnnnnnnnnnnnnnnnnnnnnnnnnnnnnnnnnnnnnnnnnnnnnnnnnnnnnnnnnnnnnnnnnnnnnnnnnnnnnnnnnnnnnnnnnnnnnnnnnnnnnnnnnnnnnnnnnnnnnnnnnnnnnnnnnnnnnnnnnnnnnnnnnnnnnnnnnnnnnnnnnnnnnnnnnnnnnnnnnnnnnnnnnnnnnnnnnnnnnnnnnnnnnnnnnnnnnnnnnnnnnnnnnnnnnnnnnnnnnnnnnnnnnnnnnnnnnnnnnnnnnnnnnnnnnnnnnnnnnnnnnnnnnnnnnnnnnnnnnnnnnnnnnnnnnnnnnnnnnnnnnnnnnnnnnnnnnnnnnnnnnnnnnnnnnnnnnnnnnnnnnnnnnnnnnnnnnnnnnnnnnnnnnnnnnnnnnnnnnnnnnnnnnnnnnnnnnnnnnnnnnnnnnnnnnnnnnnnnnnnnnnnnnnnnnnnnnnnnnnnnnnnnnnnnnnnnnnnnnnnnnnnnnnnnnnnnnnnnnnnnnnnnnnnnnnnnnnnnnnnnnnnnnnnnnnnnnnnnnnnnnnnnnnnnnnnnnnnnnnnnnnnnnnnnnnnnnnnnnnnnnnnnnnnnnnnnnnnnnnnnnnnnnnnnnnnnnnnnnnnnnnnnnnnnnnnnnnnnnnnnnnnnnnnnnnnnnnnnnnnnnnnnnnnnnnnnnnnnnnnnnnnnnnnnnnnnnnnnnnnnnnnnnnnnnnnnnnnnnnnnnnnnnnnnnnnnnnnnnnnnnnnnnnnnnnnnnnnnnnnnnnnnnnnnnnnnnnnnnnnnnnnnnnnnnnnnnnnnnnnnnnnnnnnnnnnnnnnnnnnnnnnnnnnnnnnnnnnnnnnnnnnnnnnnnnnnnnnnnnnnnnnnnnnnnnnnnnnnnnnnnnnnnnnnnnnnnnnnnnnnnnnnnnnnnnnnnnnnnnnnnnnnnnnnnnnnnnnnnnnnnnnnnnnnnnnnnnnnnnnnnnnnnnnnnnnnnnnnnnnnnnnnnnnnnnnnnnnnnnnnnnnnnnnnnnnnnnnnnnnnnnnnnnnnnnnnnnnnnnnnnnnnnnnnnnnnnnnnnnnnnnnnnnnnnnnnnnnnnnnnnnnnnnnnnnnnnnnnnnnnnnnnnnnnnnnnnnnnnnnnnnnnnnnnnnnnnnnnnnnnnnnnnnnnnnnnnnnnnnnnnnnnnnnnnnnnnnnnnnnnnnnnnnnnnnnnnnnnnnnnnnnnnnnnnnnnnnnnnnnnnnnnnnnnnnnnnnnnnnnnnnnnnnnnnnnnnnnnnnnnnnnnnnnnnnnnnnnnnnnnnnnnnnnnnnnnnnnnnnnnnnnnnnnnnnnnnnnnnnnnnnnnnnnnnnnnnnnnnnnnnnnnnnnnnnnnnnnnnnnnnnnnnnnnnnnnnnnnnnnnnnnnnnnnnnnnnnnnnnnnnnnnnnnnnnnnnnnnnnnnnnnnnnnnnnnnnnnnnnnnnnnnnnnnnnnnnnnnnnnnnnnnnnnnnnnnnnnnnnnnnnnnnnnnnnnnnnnnnnnnnnnnnnnnnnnnnnnnnnnnnnnnnnnnnnnnnnnnnnnnnnnnnnnnnnnnnnnnnnnnnnnnnnnnnnnnnnnnnnnnnnnnnnnnnnnnnnnnnnnnnnnnnnnnnnnnnnnnnnnnnnnnnnnnnnnnnnnnnnnnnnnnnnnnnnnnnnnnnnnnnnnnnnnnnnnnnnnnnnnnnnnnnnnnnnnnnnnnnnnnnnnnnnnnnnnnnnnnnnnnnnnnnnnnnnnnnnnnnnnnnnnnnnnnnnnnnnnnnnnnnnnnnnnnnnnnnnnnnnnnnnnnnnnnnnnnnnnnnnnnnnnnnnnnnnnnnnnnnnnnnnnnnnnnnnnnnnnnnnnnnnnnnnnnnnnnnnnnnnnnnnnnnnnnnnnnnnnnnnnnnnnnnnnnnnnnnnnnnnnnnnnnnnnnnnnnnnnnnnnnnnnnnnnnnnnnnnnnnnnnnnnnnnnnnnnnnnnnnnnnnnnnnnnnnnnnnnnnnnnnnnnnnnnnnnnnnnnnnnnnnnnnnnnnnnnnnnnnnnnnnnnnnnnnnnnnnnnnnnnnnnnnnnnnnnnnnnnnnnnnnnnnnnnnnnnnnnnnnnnnnnnnnnnnnnnnnnnnnnnnnnnnnnnnnnnnnnnnnnnnnnnnnnnnnnnnnnnnnnnnnnnnnnnnnnnnnnnnnnnnnnnnnnnnnnnnnnnnnnnnnnnnnnnnnnnnnnnnnnnnnnnnnnnnnnnnnnnnnnnnnnnnnnnnnnnnnnnnnnnnnnnnnnnnnnnnnnnnnnnnnnnnnnnnnnnnnnnnnnnnnnnnnnnnnnnnnnnnnnnnnnnnnnnnnnnnnnnnnnnnnnnnnnnnnnnnnnnnnnnnnnnnnnnnnnnnnnnnnnnnnnnnnnnnnnnnnnnnnnnnnnnnnnnnnnnnnnnnnnnnnnnnnnnnnnnnnnnnnnnnnnnnnnnnnnnnnnnnnnnnnnnnnnnnnnnnnnnnnnnnnnnnnnnnnnnnnnnnnnnnnnnnnnnnnnnnnnnnnnnnnnnnnnnnnnnnnnnnnnnnnnnnnnnnnnnnnnnnnnnnnnnnnnnnnnnnnnnnnnnnnnnnnnnnnnnnnnnnnnnnnnnnnnnnnnnnnnnnnnnnnnnnnnnnnnnnnnnnnnnnnnnnnnnnnnnnnnnnnnnnnnnnnnnnnnnnnnnnnnnnnnnnnnnnnnnnnnnnnnnnnnnnnnnnnnnnnnnnnnnnnnnnnnnnnnnnnnnnnnnnnnnnnnnnnnnnnnnnnnnnnnnnnnnnnnnnnnnnnnnnnnnnnnnnnnnnnnnnnnnnnnnnnnnnnnnnnnnnnnnnnnnnnnnnnnnnnnnnnnnnnnnnnnnnnnnnnnnnnnnnnnnnnnnnnnnnnnnnnnnnnnnnnnnnnnnnnnnnnnnnnnnnnnnnnnnnnnnnnnnnnnnnnnnnnnnnnnnnnnnnnnnnnnnnnnnnnnnnnnnnnnnnnnnnnnnnnnnnnnnnnnnnnnnnnnnnnnnnnnnnnnnnnnnnnnnnnnnnnnnnnnnnnnnnnnnnnnnnnnnnnnnnnnnnnnnnnnnnnnnnnnnnnnnnnnnnnnnnnnnnnnnnnnnnnnnnnnnnnnnnnnnnnnnnnnnnnnnnnnnnnnnnnnnnnnnnnnnnnnnnnnnnnnnnnnnnnnnnnnnnnnnnnnnnnnnnnnnnnnnnnnnnnnnnnnnnnnnnnnnnnnnnnnnnnnnnnnnnnnnnnnnnnnnnnnnnnnnnnnnnnnnnnnnnnnnnnnnnnnnnnnnnnnnnnnnnnnnnnnnnnnnnnnnnnnnnnnnnnnnnnnnnnnnnnnnnnnnnnnnnnnnnnnnnnnnnnnnnnnnnnnnnnnnnnnnnnnnnnnnnnnnnnnnnnnnnnnnnnnnnnnnnnnnnnnnnnnnnnnnnnnnnnnnnnnnnnnnnnnnnnnnnnnnnnnnnnnnnnnnnnnnnnnnnnnnnnnnnnnnnnnnnnnnnnnnnnnnnnnnnnnnnnnnnnnnnnnnnnnnnnnnnnnnnnnnnnnnnnnnnnnnnnnnnnnnnnnnnnnnnnnnnnnnnnnnnnnnnnnnnnnnnnnnnnnnnnnnnnnnnnnnnnnnnnnnnnnnnnnnnnnnnnnnnnnnnnnnnnnnnnnnnnnnnnnnnnnnnnnnnnnnnnnnnnnnnnnnnnnnnnnnnnnnnnnnnnnnnnnnnnnnnnnnnnnnnnnnnnnnnnnnnnnnnnnnnnnnnnnnnnnnnnnnnnnnnnnnnnnnnnnnnnnnnnnnnnnnnnnnnnnnnnnnnnnnnnnnnnnnnnnnnnnnnnnnnnnnnnnnnnnnnnnnnnnnnnnnnnnnnnnnnnnnnnnnnnnnnnnnnnnnnnnnnnnnnnnnnnnnnnnnnnnnnnnnnnnnnnnnnnnnnnnnnnnnnnnnnnnnnnnnnnnnnnnnnnnnnnnnnnnnnnnnnnnnnnnnnnnnnnnnnnnnnnnnnnnnnnnnnnnnnnnnnnnnnnnnnnnnnnnnnnnnnnnnnnnnnnnnnnnnnnnnnnnnnnnnnnnnnnnnnnnnnnnnnnnnnnnnnnnnnnnnnnnnnnnnnnnnnnnnnnnnnnnnnnnnnnnnnnnnnnnnnnnnnnnnnnnnnnnnnnnnnnnnnnnnnnnnnnnnnnnnnnnnnnnnnnnnnnnnnnnnnnnnnnnnnnnnnnnnnnnnnnnnnnnnnnnnnnnnnnnnnnnnnnnnnnnnnnnnnnnnnnnnnnnnnnnnnnnnnnnnnnnnnnnnnnnnnnnnnnnnnnnnnnnnnnnnnnnnnnnnnnnnnnnnnnnnnnnnnnnnnnnnnnnnnnnnnnnnnnnnnnnnnnnnnnnnnnnnnnnnnnnnnnnnnnnnnnnnnnnnnnnnnnnnnnnnnnnnnnnnnnnnnnnnnnnnnnnnnnnnnnnnnnnnnnnnnnnnnnnnnnnnnnnnnnnnnnnnnnnnnnnnnnnnnnnnnnnnnnnnnnnnnnnnnnnnnnnnnnnnnnnnnnnnnnnnnnnnnnnnnnnnnnnnnnnnnnnnnnnnnnnnnnnnnnnnnnnnnnnnnnnnnnnnnnnnnnnnnnnnnnnnnnnntttgaccaagctggagaaagatgaagaattttataataaattatcaaacatgagggaacctcacagataaatattgaaaccagtaaagaaaggaaacaatattaatctttgaaactttagttatataatatatatccaaaagaattaaaaatgacttgcaagggatctccttaaccaagaaaacaaaactatttgtattatacatgtataatagtgaattactttgtgcataaggagcaggtccttttaggcatttgctgaaagatgtgactgaccagactctttcaaagccctttttgttatagtctttttagttggtccctttttattttgttccttccatcttcctcttggcgaagctgataaattaaatcctctgcagccccaagccagtagtcaccatcaaaatacaggagtcttgcggcagtaaccttaggcctacattcaccaatagatacaaggaaatgatcatataagttggagaggtcgaccacaatattctccttggcagcttttcttaacatggccagatatctgcagaaacatgtttacaaatgctgaagttagagatgaataaacctaatcactgaacaagaaaattaagtgaggttcaaaatgaaaacctgtgatttaattgtcaacaatttgaatttcaaaatgataaccacaaaaggagtacatacatttatgtcaggctcaactaccaaacataagtgttctttaacacccattaatgtaaatttcaacaaattgtccactacattcttaaaatttcaaattatagtaatatagttaggagaatattagtgtaatgccttggattttaagcatgttattaagcttagattaagcccatgattaaggattataaacatgtttacgggtatccaaagaaaagcgtgagaaagagaggtgttggctgatttttgggggttttctgaggttccacgcctggggcgtgggtgtccacgcctggagcgtgggaaacagctcagaaaaccaattttctctggaatgccacgcctggggcgtggggagccacgcctggggcgtgggaagtgctccagaaaatggattcttactggactgccacgcctggggcgtggggagccacgcctggagcgtgggatgttctggactgccacgcctggggcgtgggagctcgggcagggccactatttaaagcccaaaacgcgaaaattgaaggaaaaagcttcttcttcttcctctgaacgcccaaactccattgttggagcttccaagcttgcttttgctccatagttcaccaaatcaagccccttaaacatcaatcttgatggaaaacacctagtgagcctaaatccttcatccatttctcttgaaaaaccccaaatttgagaatccctttctcaagggaagttcttgaaacttgagttcggcgaggaacggcgacaaatcgtgagtacccaagctaggggaagttgctattgggcattccttgtcgtcattgaggtaagaaactcaagtttcaccggttaatttgttgattggggttttgggtgaatagtgacccacttttgatagagcttgaattagcnnnnnnnnnnnnnnnnnnnnnnnnnnnnnnnnnnnnnnnnnnnnnnnnnnnnnnnnnnnnnnnnnnnnnnnnnnnnnnnnnnnnnnnnnnnnnnnnnnnnnnnnnnnnnnnnnnnnnnnnnnnnnnnnnnnnnnnnnnnnnnnnnnnnnnnnnnnnnnnnnnnnnnnnnnnnnnnnnnnnnnnnnnnnnnnnnnnnnnnnnnnnnnnnnnnnnnnnnnnnnnnnnnnnnnnnnnnnnnnnnnnnnnnnnnnnnnnnnnnnnnnnnnnnnnnnnnnnnnnnnnnnnnnnnnnnnnnnnnnnnnnnnnnnnnnnnnnnnnnnnnnnnnnnnnnnnnnnnnnnnnnnnnnnnnnnnnnnnnnnnnnnnnnnnnnnnnnnnnnnnnnnnnnnnnnnnnnnnnnnnnnnnnnnnnnnnnnnnnnnnnnnnnnnnnnnnnnnnnnnnnnnnnnnnnnnnnnnnnnnnnnnnnnnnnnnnnnnnnnnnnnnnnnnnnnnnnnnnnnnnnnnnnnnnnnnnnnnnnnnnnnnnnnnnnnnnnnnnnnnnnnnnnnnnnnnnnnnnnnnnnnnnnnnnnnnnnnnnnnnnnnnnnnnnnnnnnnnnnnnnnnnnnnnnnnnnnnnnnnnnnnnnnnnnnnnnnnnnnnnnnnnnnnnnnnnnnnnnnnnnnnnnnnnnnnnnnnnnnnnnnnnnnnnnnnnnnnnnnnnnnnnnnnnnnnnnnnnnnnnnnnnnnnnnnnnnnnnnnnnnnnnnnnnnnnnnnnnnnnnnnnnnnnnnnnnnnnnnnnnnnnnnnnnnnnnnnnnnnnnnnnnnnnnnnnnnnnnnnnnnnnnnnnnnnnnnnnnnnnnnnnnnnnnnnnnnnnnnnnnnnnnnnnnnnnnnnnnnnnnnnnnnnnnnnnnnnnnnnnnnnnnnnnnnnnnnnnnnnnnnnnnnnnnnnnnnnnnnnnnnnnnnnnnnnnnnnnnnnnnnnnnnnnnnnnnnnnnnnnnnnnnnnnnnnnnnnnnnnnnnnnnnnnnnnnnnnnnnnnnnnnnnnnnnnnnnnnnnnnnnnnnnnnnnnnnnnnnnnnnnnnnnnnnnnnnnnnnnnnnnnnnnnnnnnnnnnnnnnnnnnnnnnnnnnnnnnnnnnnnnnnnnnnnnnnnnnnnnnnnnnnnnnnnnnnnnnnnnnnnnnnnnnnnnnnnnnnnnnnnnnnnnnnnnnnnnnnnnnnnnnnnnnnnnnnnnnnnnnnnnnnnnnnnnnnnnnnnnnnnnnnnnnnnnnnnnnnnnnnnnnnnnnnnnnnnnnnnnnnnnnnnnnnnnnnnnnnnnnnnnnnnnnnnnnnnnnnnnnnnnnnnnnnnnnnnnnnnnnnnnnnnnnnnnnnnnnnnnnnnnnnnnnnnnnnnnnnnnnnnnnnnnnnnnnnnnnnnnnnnnnnnnnnnnnnnnnnnnnnnnnnnnnnnnnnnnnnnnnnnnnnnnnnnnnnnnnnnnnnnnnnnnnnnnnnnnnnnnnnnnnnnnnnnnnnnnnnnnnnnnnnnnnnnnnnnnnnnnnnnnnnnnnnnnnnnnnnnnnnnnnnnnnnnnnnnnnnnnnnnnnnnnnaacatgcggtccagcatagaaggtgcgtgagggttctttattgttgggatctcagcagctatgtgagaaggggaaaggtaagctccaggacttgccttggctatagtttctaagatgccaagctccaaagctgacttgagaaccatggagacagcagtggcacccgctagttccaagccaaacaagaaggcttcttcatcagatactacctccattctgcgctcccttataatcactttcaacagttaaactttagaatgactcagaatctaaagtcacacattagtcttactgttatcaacgaactaacaaaattataatctcacagattctcacaactcacacagcggaaaaaatataaacagagagagagagagacagagttatttaacgcacacacacacacacactaggaggaagagagaaattcagcttaacttttactcgctaattcattcactcactgcatatttttaaaatgttacatgggtggcctttttataggaaaagttaatacaataaaatattataaacttatagttgttccaacgcacaaagtgtgtgtatgagagagagggagagtatagtgatgggtggttgtgaagtagagtttgaggcagatcagtgcaagataccaaagctacccttgttgaaccctccaacaatgcattctccaggagatcagggatgaaaactccaccttttttcacctcagcttcagttccatttggctgggaagaggagccaggaaggccaaggccttgcactgatattgtgagcttctccaaccctactctaaagtgcttggaacttcctccaaggttgctacttgattccgaaagcaacaagaacaaaagcatcaaactttcatcacccaccactgttttggagggaccatacccttatgtggctaccacagacaacacttgcaactccccagcttttggaattagtgaagacttgtatggttcttttggttctgaaagagaacaacttaggaccatggttctgaaccaaagtgtggggatcaaggagaaggagaaggagaaagggtggtttggttctcttaaccatatccattttccctttccttccttccctatttgccacatgagcattgttgctacaactcaaatccttcttttgccccttactcttatttctcacatcatacaacatagaaaaacccaacaatttttccatcatttcccacataatttgtattttaacttcaatgctaattaactaaaagtcatcaagacattagaaaaaggcaatctaagtaacttctacaattgtgtgacttacctgtgaattgcagagctatgaagttgaaggacttagggtaattgtcctcaaatcagtaattgtcttctcttcttgaggactgagttctccatcactactattgacccttcttgtaaccttaaaagtaaacaacacacttaggctagctatgtttgaataaaagtttatacctggccatcaacaactataaccacagtagcaatgtgtgagatgaagatttaaagcaaggtgacttgtatattaaagttacatttataaaaaaatatatttgtttttagttttttataaagtaaaaataaaaggtcaaatatattttaaactaaatttattttttaaagtttaaaataattctcatttgttattggccggtcctgcccatgaaatatatctaaagtagctatcattgattttgtatgactttcgtagcaactaaatcagaattgcatcaaggtggctattaatattgaacctttgttttaattatataaacactggattttaatagttacaaatattttattattaagatttttaggactattaaattactacaacatgttccaaattttttaagaatttagaatttagatagtgttgctgttaatcgaccttttctgtatttagaggtttcatttatgcataatttggtagagtagaatggaataaaataaataaaataaaaaataaatatttaaattaaaatactgtgctgatccaatgtaagggctggggatccattgaatttttctaaaaatttattttcttttcattccttcctcctctaccaaaatcaccattaattatcatgtcatataattataaaaactggatcctgattatattttggtgcaatattttttttggatacaaggatcctgattatattttttttttcataaaagaacttgattctaattgttctaattattttatcatacgttctgaaatataaagttaccaaataaaggatgcaggtcggagacctaacctcacacattgaataaacgaataaaactaaatcatcatgcatgcatgtgaaatgaaagaaacaaattaagaagtaacagaaaaaggtaaagtgagagcgagggaccaaactcaaggtggaggcaccgttctgttctggggttatatatggctcttcgatggcagcttgtttgtttggttctgttcttgctggaagaagaataatgagattgtgttatgaggtttgaaaatagctagtgagagtgctatatggctgagtgaaaggaagaatagtgagtagtgttctcttttctgtgcttcaattttcaacttattcatcattgtatcacaacagtcactaatcacaaacaacattcacaccaagcatgccaaatagcacaaccatagatgcataaagtattaaataagatgcagaagcagaaagcattacaatccacaatatccaataatcttaatcatccattaatcgttccttaccaataaatgtcaaaatctgtgaattctataacgcaggaaatacaatcagaaaaatctcaaataccaaaccaaaaacagattcctctggaaaataagatcctgccgttccctttgtgtgtaaacgaccacagtagcattcccatacctgtaataaagattcaagaacaaatcacaccaccttaacaaaccaaacaagagaaaacaaaaacaaaacctccccaaaccattccaaaattcccaatcaaacactcacctatcctctttaggcacatcagaatatgtcagcttaacaaccgcaacacttgattcaggctcctcaaacacaaacctcgcctgcaaataaacacagataatcacatttttgacatttatgattaaaatcattatttttgcacattaaagttacatttataaacaaggtcaactcttacccaaaccctaaccttctccaagatcaagggcttccttggaaaccatggcgtccttaatcgtcttcccaacaggtccctcgtcgttgacagtaaccctaacttcgagatcctcgtcaacgttctcgtcggagatgtagggaatctcgacggtgccatcgaccttgagaagcgaggttccctgggagtctttggcctctcccttccaattgagagtgacgctgatctcgtagccgaggatgaccttcccctttcgaacgttgatgtaggcctcgccgttgagggagtagagcgacgtcattttgaggaagaggttagcgtcaccgtcgaggattgggaggtttgtaaggaggctggtgaagaaggtcttggaccagtcgaggcagttgtcggagtcaaagtcggagaagtggaagaatgggggtcaggttggaagtggaaggggggttcagattggaaggggtcggggaaatcggtgggagggagagaatacacgagaggttgcttgttgttccatggaattcgaattaggtggtgagggagatagggttgctctgttggtggtgaagggaaaagagatttaaagtgagagagagagagatagacagagtgtcgtaataatttaaaagcaatcaaggacggttatataattaaccatcgttgaaagcgctcttttaagacggtcattagaaaaccgtcgttgtcaaagttgattatattacaaaattgccaccgcacgcacattcgaagacggttattgggaaccgtcgtcgtttcgctgtcgtagaatgttatttttgtagtagtgcacataactaaacacacacgtgtgtgtatatatgggcacacatgcacaaattaaatattcctatccttatatttaatttcctttttagtcctttctatcttttataagactataataattttctcatgcttttatggaatgtgaaacaagtgaagagataagagaaataaacctttcaaaaaaaataataatataaaaatataagaatcaaagttatttatacattaaaacaggacattttgtcaaagttcattttcacactaggaaaattaacatcaaactaaattttattttattgtcctctaaatattttgattttaaagccatgataatcatataataattccttgatttccttcacatcatctactttacagcttgatttacacccatataaaaaagttaatttgttctgtttttttctatatttttattagtttacacaaaagtgtctctattagcttcatcttgtttcttcatgtggaattaaagaaggaatcaagacacaattcttctcatagattaattaattaaaaacaaatctacacgaatccgtgggtacctacccgaatccgtcctgattttagtgggaaaaaatcaaattaatcgggttcgagttttctccgaaagtcaaaagtgggggcgggggcgggtatgagattactaatacccgcccccgcccccaccccagccccgtaataaataatattaaaaaaagaaaaaaaaagaaatattattttataattttttaattgaattaattaattttgttttgtaatttttaaattatgatctcatattttaaatgtagttttgttattgttttttattaagtaattagcattttcgttcgattttttaaataaaaatttatattattttttaattttaattaaataacgggggcgggacggggcggaaaaaacccgacctctagggggcggggatggggataggttttaaaacccgatgaagattgggatgggatcgagaaacgggttttgaatagaggtggagatagagaatgcaatatccacccccgccgcgtccagttaccatgcctcctatcaaacatgattgagaatctaaagcccaccaatcttgagctgaattaaaactgaaaacacatatagaatcttagaaaattcaacgagaaaattcaacgagcagccttctttctatgttaaaatttatgccaaaaattaaaaaatacaattaagcctaaaatttagaaaatatctcttgaaacattcaattgctggatctcttcatcttgatgattattagttattatacttgaagcatctttttttttaggctacttgaagtattcttaagcaatttaaatagtcattctattaaattacaatgatcatcagtcaaattttttgttcgagattattcattaataaaatataagatactccatactgtcacgggtaaaaaaaacaaattatagtactaatgtttaaagcaaaagttaataacattacataataaagaataaccaatataattcaatttaaatataaaaaaattactttaagctaaaagaatgacggaggctagggtacgcaagtgaaactcttgggtacagtccgaaagcgagccgtgaccattggattcgtttgaattttcatcagacggtctccatttttttatttttttctttacctctgcttgctttctcccttttgccctttccttcttctacctctaccactgtccaagagcctacacaacggtggacgacgacgacagcaccggcctccatcccctcccttccaccatgtcagagttcctcctcagcaccttcgcgttccgacttccatgacccaccgtgcacctcccaccgcaccgcacgattcacctcgatcgagccgtacaattggttccttccagctctggcgacaaacccatcgtgaatctccatctccgtccttctctttcatgccccttgtctccatctcctctggaagaagctcgttgacgatcttccagaacacagcagcaacaacacactacgaactccactgcaaaccttggcgctaatcgcaaattgcagcaaacgtcactgtgaagtgaaacccacaccgcgaactgtactataaaccgccgcgagccgcaccgcgaactgtaaaacattgtgaaacccacctcgaacccgcttcaacgtcaagagttttatccaaaccccaaataaggttattctttctctatagtgtagattgaggttgggagaagcggagatggagacaaggggcgtgaaagagaaggacggagatggagattcatggtggatttgtcgccggagctcgagatggatagtgaaggacaaattggtaaatggaagaaaaaaagaaaaagaaaaaagaaaaataaaataaaataaaacacgatccaatgatcaggattgctcacggacgataagtaagaattttacttgcgtaccctagcctccgtcaaaagaatgtgcttttcaatggaaacttgattgtctctatcgcgtatcaatatctaaattggcgtgaatcttcagcagtgcaaaacgtatttcaccgcactatatacagtagataatctaactgccccctctcttttaagttttaacaatgatatgtttattattttatataaaaataaattaaatattattttggctacgatgtgttatgatcggaggggatctcaacccatatctttatgtagtatgcctccttctcattaaagatataataagttaatttttttattcataataattgaatacgatataacatgtttacaacactttatattctattcaattaaatgaattaaattctcttgttagcttttttttttcttcttttattgaaaattaatttgtcttttcttcctcttaatttgtttgtctcattttttcttttgttttgattagacaaaagattcacgtgcttctctctgcctggaaacagctttaaaatcacaactttgcataatcttgactgtgtatcagactttcccctctcctattctttacaataactcatcagcggtcgagatctttgcaggatgtcggctggacaaaaacataattgaattggaaagatgttagaaacacatttttaaatgcatctttttaaacacacaattatttattatttattgaaaattattagtaatcataaaatttttaggatcccatatatatataatgagtaattttgttaattttgaaattttcaataaaatttaactaagaagaaatattatatattgatagtgtaaaattattgttattcttatcacaaactattatttattataaatatattatttttataataattattttaaaaattttattaatgattatttgttattggatgacactataaaaatatttaatattgtcagtatttacttgacaattaaaaagctcttttaactaataggatagagtgtattagaaataacattagagagtgtgtttgtaattatcaagtacataaatcaactgacatagaagttgtttctacttaattagtgatcttgaattcgaattctaagagtgtgtttgattcgctaaaatataagggactggacaacacataaatatttgtctaaggtttgatttaaaaaatgaccgtacaaaataaagaatgatggactcgacaaatacccaaaaatttgtaactcactaaatcttgtacaactttttgtccagtgtctaacgaacgtaaaaatacaataatatctctatttttctgacttttcattatctcactcctttttccatatgtgcctccttctctaaacctccctctccaaacgtcgtacatgccgttgtcgttgatgagatccgtgccgctctcttcactcttccttcccctctttttccctttcgttttatattctttctttcttctttctgttggtttgtttgacttcaccttcccagttggcaccttggccgctggcgagggttgtatgtactattgttgttccctttttcctcatgatttctttcttttcattgttaatttattcaaatgttcacatcgtcatcttccttcttctcgctatgtttttttcttttggccaactctgatgaggccgtgtcgagctgtcgccatcgccgtgaccctgtggtggcctcgcattgccaaggcctatgcttggtggcgtcagggactgtgcctcctctgtggaggtgcctctcctttgttgcgctccgtcaaggtgctactaatgcacctaggatattccaactcattcctttacgtgcaggttgggggttgctttgaaccaattccaaccctagctccaaaaaaacgaagaaaaaaaaaagaattgaaatgggcaaaaaagacaagcctggtctgaattaaaataaatactgctagttacaccatttttcaatatacaaacattgtacagtacaaagagtattataataaaatttaattacattattttgtctaatacataatttcatcaaacaagataaacacaattatttatattgtacattaaccatcaaacaacgtacaatacaaaaagttatcgtgtgactaagttacttgtctaatgttattctatttgtcctgtcatcttagcaaatcaaacacaccctaaatatataataacattaaatactataaaaaaaaatatcgcttataaaaatcttccgcattatgtgcgaaagagaataccagtcatctttatcaaacgagtgtgttcataatatgcctcctatatacaagatctaaagttaaaacatcagtaatagttgctcagcatgccagggaattaataatgacaaatacagaacctccatctcaactctcaagaatatataaggaaatgtcacttctggaaaccctaattgcatgtgtattaagcatttaagcaattatttttcctcctagacacagtatttcgaattccaacccacaatgctgcagccccaccaccactactacatcataattccaatcaatagcccaatcaatttactttctctgttatcctctgtggtcggccagaaagactaataaagttgtggtgctcctagctagttcagaattatgaagacatgaccattcccttattctggatatcatgtccttaattctagcctgttttctttgtttcttctacactaaggctgccctccagctatgccagtgtttcctcctgccatggcaagcatgctcaaatgcacaaactcagaaatttaactcttcaaactttccttcattgttggttgaattatatgtggttattttccctatgtggtgtgcacgtagcttatacaccttttgattatgggaaaggaattattatgtgcaattgaaccgtctcctgaatctggtttaaatgggttgtttgatcaaggtacgaggctagctagtagctaaactagcttatggaatcaacaagaaaacacactatattatatggagtgtttgtttcatggtataattttccattcctgggaaccacattcctaagaatattatgcccaaaaatgttattctcatagacatgtttggttggtatttagtagttgaagaattttttttaaaaaaaaatataattaatttttaaaaaataagtaaaaaaataataaaatataataaaaataggtaattattgtagaaaataactttcattttcatgggaatattatatacccacctctcctcatggtaatagagtttccttgaaacatgaagaaataacatttcttagaatataacatactcgggaataaattcacataaccttctagcaaagatgggtatatatatttctacccttatatttctgggaataaaagaacatgacgtgaaacaaacgccctcatagtaatttaccatatcaaacatacatagattagctggcgggagattattccatcatgtctcgagtccaactcctaaatattcaattacattaaatattatatttgagaggatttgtcgcccataataattagagtttaatgtttatgtactaacaatacaaaatagttttacactgttattcaaatacaaattacaatttgaattactttaaaataattatttgaaaagttgataaatttatcatatatggtgagttgtgattagatgaatgtataagaaattttatattatcattgtataaccttttttctctaatgattatacttgactcaaccaaaatgaccttctatgaagaatacactactagaaaaatgggatttaatatcgctaagttaacatcggttatttataaaaccgatattaacgaaaacgcggtggcaaattcgtaattaaaaggatatggttaacatcagttttcttaaaaacctgaaaaatcgatgttaacgtctttgtgttaacatcggttttcttcaaaacccatgttaacaggaatacgttaacatcgattttccaggatttttagaaaaacgatgttaacgtgttcctgttaacgtcaatttttcaggtaaatttgaaaaaaccgatgttaacatgaacacgttaacattgattttccaggttttttagaaaatcgatgttaacgtttcctgttaacatcggtttttcaggtaaacttgaaaaatcgatgttaacatgaacacgttaacatcgattttttaggttttaaagaaaatcgatgttaacaggagataattaacattggtttttcaatgaaaaccgatgttgttttattaaaaaaaacttaaacacccttgtcgcgcctatctctcactgtcagtttcagccttcacgctcgttctctcagcctccattgttggttctcgtgctcgttctctcagccttggcggtggttcactcagccttcactgttggtgttcacggcgcttccacgatggttttggttgtcgatggtgtcacttacggcgcttccactctcgcctcccacaaggttagcattcctcctttggtttatgtcctatgattcttctttaagcactcaaagataaggatgactgatgttgttacatcagatactgcttctcactctggtgtcgcttatcactcgtgcaactgcgacttctcactctcactctctcagctcaggtactctctctttctctctctcgatagatgccacaccaatatctcctcgtatacaataacgttgtatcgtgttctttcttgtgtggtcattgatccaatgggtggcccgttatcttggttattgggggtgggggtggggtcttgcttggtttgggttggaatatacatgtattttatgaaaaaaatataaaattgcaattttgattccctttaattcttaatccataattttttctcgctatttttttgtgattttagtccacaaatatatgaaaatctaaaattttagttcaatcctcaattttataaacaattttttattttttattttaattaattagagtatttttatttttaaatgttacttttcatttcttcaaaatagtgacatgtcatcagtcacctatcaagttaaattgaagatttttttcttcagtagttgaattaaagattgaactaaatttgagaattaacaaaaaaatgagttttctataatataaggattaaaataaataaaaaacaaaaacaaaatcgaattccaagaattaaaggatatcaaagattaatttaatttaatttaatttaataatttaataatttatatatatatatatatatatatatatatatatatatattnnnnnnnnnntatatatatatatatatatatatatatatatatatatatattacatactcatcactccgagcttaaaagttaaaagtttcatattaattctataatgtttatattttttaaatttatcacatttgtgtatttttttttatcgtattcatttcatgtatttgtatttttaagttaaagtctatttactcttgaatcctccacgataaattttctttctgaatccgtcggtaggaaagagaaactcgcaatgctgattcattggcttcattggcctctagtatgtatgcagcatacacattacaacatttacaatacataattacttaaatagattatttatttaaaatttgtaagttttataataccatataagttttaaaaaaattacaaaaatttactcaaatattaatgttgctaaaataaatacttaacttgaatcacattaaattttataattgaaaaataattttttaatcagtcagaataaattaagcaatgaatccaatgattgttcatcggtaagagcatttccaataagtaaaatttaagcaactcattttaaattttaccttatgttaattggtccctataatatcacgtcttaaataactcatatattttgctctaatgatatagttttaaacaactcttaagttgtcattcttaaatgattcttaaatgataataaaatattttttgctcataaacaattgttgcttatataagtaattggagcttaattttaattctaatatgacatgtagatcatctccaataataaaaaaaattaaggaacggtgtctaaaaataaacaactcattaagtaattagtgttgaagatacactaagcaactcacttaaacacattgtcaagtcacttattccaataataaaaaattattaaacaatgttacttaattttaagcaattcataaaatacccacgttgaagattctcttagtacaatttgaaatattnnnnnnnnnngtcaaaacaaaaatgttgtaaacttattatttttttaagataacattagtataaaatattcactagtttcactgataagaaaaatttgactaatcatatttaatgtgatcttttcttttaattatagtttttttgtacacaagacttaaacttgaaagcttgattaaaggtatcagatctaattctactccgaacaaaaacttattagtaatttaacttaactcattatttatattttaaatcaaattcttaaatatttaagtcaaataattagtaaactttaaaaattataaaacaaaacaaaaaacttttttaagtgagctcctaataattgcttgtcaaaactaacaaaatgaaattaccttactattatgaaagttttgccaaggtcctttattctttgtcaatatacattgcttgattcataatctctatttatttaattagtaaactaaaacttactaacaactcaatttttttcgcaaaactatatcatttaatcacatttaaagttcttatttgcaacaatgtcaaaactctatgatttcaaatatttcaatcattttgtataaaccagtaaaacatgcaagtatagagaaatcttgcttgaagaaattcgctaaagaggcaaattcaatttagcaagcctctgaagatcaattttaatggcaaccatgttttgtttccatttatcttaattattctacattgcatgattagtcaggtccgtgtctacaagttttgaggtattaggcaagtcttttatttgagttttactttaatacaactcatcaatttctattttattcttctaattttgtcaattatatttgttaactaaagtttaataatgaagcaattttaacattttcattatttaataacttatttaatcatcatcttataggatttttatctcaaattaaatcttaaaatctaatatttaaaaaatattttcaacaatcattgtgcaagaaataatgataatattctatcaacattacatgcactcaaaaatatttttttaacatattttaatactttaattagggcactaatttttttgtttagttatttactaactttaataaagcaataaatgtctacactactaatataaaattgatattcactnnnnnnnnnnnnnnnnnnnnnnnnnnnnnnnnnnnnnnnnnnnnnnnnnnnnnnnnnnnnnnnnnnnnnnnnnnnnnnnnnnnnnnnnnnnnnnnnnnnnnnnnnnnnnnnnnnnnnnnnnnnnnnnnnnnnnnnnnnnnnnnnnnnnnnnnnnnnnnnnnnnnnnnnnnnnnnnnnnnnnnnnnttatattttaatattataataacttatttgtattgttatataaagttacttttaattattaatactttttttaaaaaaaatatttgaattcaacttaaaaacaaagataaaaagatggattatgcaacaaatattattaattattattttttattaatttttttctttgaatctatttttttcattgtgcatcaatgaaaaagatagattaaaagagaaaaaagttaaccaaaaaaatccaaaaatatttttgttaaatagtttttttttaaaatgttcttgttaaacaataattcttaaaatattctcatttaatacaattattttattttatgttcggagacagaataatgtttactaagtttttaataacaaattaaatacaaataatataataaaatttactatctaataatttaaaaatataaannnnnnnnnnnnnnnnnnnnnnnnnnnnnnnnnnnnnnnnnnnnnnnnnnnnnnnnnnnnnnnnnnnnnnnnnnnnnnnnnnnnnnnnnnnnnnnnnnnnnnnnnnnnnnnnnnnnnnnnnnnnnnnnnnnnnnnnnnnnnnnnnnnnnnnnnnnnnnnnnnnnnnnnnnnnnnnnnnnnnnnnnnnnnnnnnnnnnnnnnnnnnnnnnnnnnnnnnnnnnnnnnnnnnnnnnnnnnnnnnnnnnnnnnnnnnnnnnnnnnnnnnnnnnnnnnnnnnnnnnnnnnnnnnnnnnnnnnnnnnnnnnnnnnnnnnnnnnnnnnnnnnnnnnnnnnnnnnnnnnnnnnnnnnnnnnnnnnnnnntaataagatgattaactttagaagtcatatctaaaacaatttttaatgaccgacaaaaaaatctttatattaatactcaattttgaatttaatccaaaatatttgttcaattctcaattttacatacattttttatttttatattttatttaattagagtatttttattgttaaatattaattttcatgtcatcaaaatactgacatgtcattagtcaattgttaagtcaaattcaatatcgaacaaaatttaaaaatttaattaaaattatgaattttttaaattactcataattacttcttacataccaagtctcgggttacattgaatcctagttgacagtgacagtttgactaatgtgttctttctatgagacatgtaaaaggataaacatagctgatttaaacttagtcgcttgcatgacaaaggtcatcaaattcttcgaaagtaaggtaaaaccctatggttaatcaagatggtaataacttttagaaagacacccttttctaggataacacatgtcatattcttggcaattgactatctatcaatgtacaatatcatcgtcagatgaactatctacaatgcccttcaagcaataccctctaccatccactccatgatgaagctctataacatttccaactacataaccatggacattgtgcgggggatagaatcccatgaataattagtaaaaagtctctcttgatagtcgttgcaccatcatcaaaaaacattatttttcaactacataaaaaaaactgagatttgattaaattttatagatttatatctatattttgatttgataactattattgttcattcagtcatcgaaaaaataaatgaaactacgaaatcttcgttcgaggcggtggctcacgatggttacaacggtgagacaagaaagagaaagatgaaggaaggagacggtggctgagtgaggagacataaaaggggtgggtaaaacgggaaaaagagaagaaaaaaagaaaaaggaaaaagaagaataaatcttgactatcagttaaaaaaagacgatattagacgatacaagtatcctcttgcacggtgcaagacctattaagcaaggttgtcaaacttgtaattttatgtaaatttgtggagatttaaacttaatataaaaaatatattaatattttatatataaaatcatgactaaatatttccatcctaaaataaattaaaataacaaactttaataataattcaataaataaatagtccacgtcaaatcaaacataaattcataaatacaaaacataagttcctaaaataaaaatatttaaaaaatatacaaatagttcaaatattcatcaatcctctaattaaatcatctccaatatcaccaccaccatcatcatctttatctccatcatttttaagctctccgaatttacttcaaatttggttcgagtttactccaagtatgtcagaaatgattttgcgtgcgattcaacttgttggggtgcatagactcgtaaaatcgtactattttactatttaaaatatatataaaatatgggatccaattctatcaaatttactctgagtctgccaaaaatcgatattaattttatctactgttattaatataaaatatgatttgaagtgaactgaaatttattgttcagattaacttaatgaaactttatttaatatttcatacaagcaattcttgttgatgaaagatcaaaactattgttagcataaaaaaaatgttattcaatgcaaagactaaacccttatttgcaatgaaggaaagaaagtggagaaggaaacaaaagtttgaaatttgaatgaaaaagaaggtcaaagagaagaaaattaaaaattttatttctaaaaatcatttttttctttattcttctttttattttttcttcaaccaaacacatacgataaaagaaaataatttattggataaatagttatttttgtccctgaatgtgtagagcgtggacaaattcgtctccgaaagatggaaatttaaatttttgtctccgaaaatgaaaaaagtgcgacaatttcatctatcagttaatgtctgacaattatcgttaattgaaagagcctatgtgacacaattacacatttagggatgaatttgtcagtgtctaccaaaaatacaatttaatcttttatctcctccctttttttaatcattgcaaacataaaattacaataaacacttaaaaaattaggaaagcaaacataagttagaacaaacataataagaaacataatattgattaataagtataatctgtctgttgctctaaaatttctattataacaacattaggtagtgacaaaatcaagttggatctcatttttttaaggattaactttcattgttcatttttgtttgagtctcatattttgagtaagatattgtcacattagaaattcaaagcaaaaatatgagacagtaccttacccaaaatatgagactcaaacaaattaaaatgcacaacctaatgttgtcaaaatagaaatttcagaacaacagacaaattatgcttattagtatgtttattctaacttatgtttgctttcttttttttaagtgtttattgtaatgtcatgtttgcaacgattaaaaaaagggagaagatgaagattaaattatattttgggtagaatgttaaaaaattcgttccttgtgtagagcgttgacaaattcgtctctgaatgtgtctcataggctctttcattaacgataacggacgaaagttaatggatgaatgaatttgtcgcacttttttcactttcggagacaaaaatttgaattttcatctttcggggacaaaaatttgaattttcatctttcggggatgaatttatcagcgctatacacattcagggacgaaaataactatttaccctaatttattttacaataactgataaaaaattatatttcacaagactacgtataattttagtatctttaaggagaacattcctattcaatttaagcataactactatagccgatgaagttttccttttgagtattcaaggttttattgttcataatcattatatcttacacaattggaaatatttcttgtaaaaaaatatctataatcttttgaatggagaacattctcattcaagttaagtggaattatcatagacaaggaaattttctttttgagtattcaaaattttattgtttataataattatatttaactcaattgaacttatttcttgtaaaataatatctataattttgtaaatagagaacattcatattcgagaataactattatagacggtaaaattttcattttgagcattcaaaattttattgtgcacattaaaatcatatttaatagaaattttttcttgaaaagcaatatctataatcttatgaatagaaaacattcatattcgagtttaatagaattactataaatgttgaagttttcttttttagtattcaaagttttattatctataataattatgtctgactcaattaaatttatgacttgtaaaacaatatcaataatcttatgaatagagaacattcctatttgaattaagaaaaaatattatagtcgataaaaaaattagtatttaaaattttatttttataataattatatctgatttaattgaaattatttattgtaaagaatatctatagtcttatgaagaaagtcaaaaacattatattttttttatcattaaaaacatttaaactaattaataaataagaagaagaagaacaagaaattaacataaaagaagaggtggggggagccaatttgactaggaagaaggaagaggaaagaaagtattaccaagagtggttgacaaaaaaggtaaaaaatgaaagtgctgacggggatgaaaaagggtgggacagaacagcactatctttagaagcaatgtgggggaatccaacagcacacaaagatctcataggccacaagaacttgtggttcaaaaaattcccctccttgctgaagtggcaaacagcaatttaattaattttcttcctaaaataaaaacacaaacaaacaaacctcaccacttcacagttcagactttagactattcattatccgttttcatatcaataataattaaataattaacagtacaaaaagtaacacaaaaaaaagaagttactgaacacaacacaacactacaccaaaccaacttctctatatatctatctgtctgtacttatgtaatatatttttcatcgtttctttccccattttttttccctagaaagagaagcaacaacaagagagagattgatagatagacattcttgaacctgaaactgttacaacacaggaatgtcagaggttaaggaccctgcgataaagctttttggaaggacaatttcgctgccacacacacacatcaatgattctttttcttctgcttctgcttcagcacctgcttgtgccccttcatcttcctcttctcctcgtgaagttacctcttctgcaacacaacaacagcatgaaactgaggtaggtgttgttaaagttgtcgtcttggtctcaattaaatttgtggaaaaccatgatgatttgcaaatctaaccgcgacccatttctcagaaccgctcaattgttaatgggtttttttttaaatcgtgaaaaagcttccttcttgccttggtgtcaattgatttgaattgagaggcttttttgcaattttctatggttatgttgattttctttttaataaaagaagtttttaatatgtgggtattgaatttgaatttattcaatcatttattaagtggtggctagaattcattgcctggttcctttcggtgaaattggatccagtctccattatggaatagaagtataagaatatagcatagaatatattttgtggtttggcttgctttatttttgctattccgtttttgagtcaatggatttgcttagtgatttttctaattctattctttagaaaaaaaaattgtcctaaaccggtttcttaatcttagcaagttcaatggatatttttaaataaaaagaaaaatattttttgtgtttatttcttattggatctcttgcagcatcacaggttaattgctacctcgttggcttgaatattttcttgttagatttattgctttacttaactctttatcaagttgcttttcacgccatggactttaattggagcttcactattttagtttgacacttttgtccatattattcaagtccttatttaacaattgtctaaagacctacaaccttgtgacatcacgaggacttattttctagaatatgttggatttatttatttcccagctgtttcatactcttataaatttttcttcttccctgccctgaattccagaacttcctttgttttctatacctgtacattttaatacaacgtttgtaaatatcaaataccatttttgggattttcagtttcaccgtggaaccgttgcctttgtctcattcatattcacacacacacatatatatgtatatatatatatatatatatatatatgtatatgtatatatgcatatatgcttctagaattgtgattttgttttgcatatctagaattgggattttagtactgaattgttcttattgactatgcactatcacgtgagcgttttcattcattaaacaaagtgcactgttaacttccttaacgtgaaaggaaaaataatttctcccccgttttccgtggtgtgaattcactcaccctcctactttttcgcttaaaatatccaagatattttgtatggtgaatcagagtcacaaagtcaaagaaaaacaaaatttcacctgtctaatgcttctattttcgtactatgtcataacacgcttcacgcaaaatttgtgtcataacatatcttatactcttgataaatactattataccaatatacttttctttttgtttcatatttgaggttttgagttcactgtttatttgtaattccactattgtagttatagtaaataaagtagcatttctaactttgatcttgttcattgttttaggaaccatcaaggaaagaacttacctcatctcaagatgatgatgatgatgatgcctcacatcaaaccacagaggatttgaaatctcccacaacatcttcaggcatatttgagaatcctaagactccctcagcagaaaccgagacatcaataccgaaagcctccacaaatggagaacaaagcgagccaagtgcttctgaagaaaaaacactaaagaaacctgacaaggtacttccatgcccgcgatgcaatagcatggaaaccaaattctgttactacaacaactacaatgtcaaccaacctcgccatttctgcaagaactgccagagatactggacagctggaggtacaatgaggaatgtgccggtaggagccggtcgtcgaaagaacaagaattcctcggcaaccgcgtcacattaccggcacataatgttctctaaagggcttcagggagccacactcaatgcccccaatggattgcataatgctgttttgacctttggtcctgattctcccctttgtgatacaatggcatctatgttgaacattgctgagagagcacaaagttgtgttccaaatgggtttcatgaaactgagccaaatagttttgtttcctatagaaaggaggaggatgttactagtggtcactctactggagttaattctgttgcaacaacttcaactttaagccatagtggctcacatgaatcattggataaaaaagttgttgaaggtttcactcctcaatttccatactttccaagtgcaccttggccttatcctatgcctcctcctacatttttcccacaagggcaccctttatcattctatactacaccggcatattggagttatatgccaccctcttggaataacaatatatcatctatctcaccccaatcttctgttaacaactctgtttctaaccctactttggggaaacactcaagggatggaaacatcattgcttcatccaattcacaaagagaaatgcatgacatggagcacaacagctcggaacacaatgccttgatccccaagacacttagaattgatgaccctagtgaagctgcaaagagttccatttccatgtggtcaaaactagggatcaagaatgatgacaaggccagttccggaggccttttcaaggcttttccatcatccaagggaaatgacatcaatcatcacatggttgaagcatcatcgccagtgttgcaagccaaccctgcggctctatcgcggtgtcttaccttccgcgagcagacctaaatgggaatgaatcagtgagccaaatcaagtgcaacctcattttgctgacaagttaagaaattgttttgttgaacaacctctctatgcaggattcctagggcagaagaagtgtttcactatggcttctctagctaccaataccatcttgagcctgttaaaactgaaacaggtgtttttgttgcagaattagatggtatcggttgagtaaatatcttggtgtacagatatatatatgtgagatgaggaaaactaggaggagacaaaagaaaggaaaggagattcttagactaaaaatccaatggtttagaataaacttacaagttttcttggaattctattgttacttttttttaagattctcttctttaattatgtcaattcataaggattattatatttatttaagtttttttttatttttatttttctttaatcatgcaaaatagcaatatatatatatattcacaaatatcaactcatgcatctgctcgctcttatctacataaagttggtttcatctttgtttttttctttcttttttgtacgtttacattcaannnnnnnnnncggagtgtaaaactatttcgatctttatattgtaagttagagtcaattttaatataagatttttttatattatattctctttttctttatgacacattatttaattttatcgttattaatcactttataagttatactttttcctttaatgttaagatgacaaaataaattaaaaaaatatgactttttaatttcttttactctttaaattataaaatggttattcaattttttaaaatatactttttctctgggtcaaagtttgttatttttttacttttttataaaaaaaaataaagttgttgtagtgtaccagatgtttacttgctagattagagaaatagaaagaataataattctactcaatttaaatacgattgtgtgacatttgtgtnnnnnnnnnnagaaaggaaaggagattcttagactaaaaatccaatggtttagaataaacttacaagttttcttggaattctattgttacttttttttaagattctcttctttaattatgtcaattcataaggattattatatttatttaagtttttttttatttttatttttctttaatcatgcaaaatagcaatatatatatatattcacaaatatcaactcatgcatctgctcgctcttatctacataaagttggtttcatctttgtttttttctttcttttttgtacgtttacattcaacnnnnnnnnnnggagtgtaaaactatttcgatctttatattgtaagttagagtcaattttaatataagatttttttatattatattctctttttctttatgacacattatttaattttatcgttattaatcactttataagttatactttttcctttaatgttaagatgacaaaataaattaaaaaaatatgactttttaatttcttttactctttaaattataaaatggttattcaattttttaaaatatactttttctctgggtcaaagtttgttatttttttacttttttataaaaaaaaataaagttgttgtagtgtaccagatgtttacttgctagattagagaaatagaaagaataataattctactcaatttaaatacgattgtgtgacatttgtgtgggttttgtgatttgtaaaaaaaatggagagagaaaaatatagatttcctttttccttttattggttatttaatacattaggaaaagagaaaaaccagtaaaattaacgggtgccactttttgaagattataatggaaatttgatgactgtactttcttttcactcttatttaattaaagaactccaaaatggagaaagttgataaattcccattcttttacgtctatacatatcaaggtcattttcaatctctattgacgcaacaacagaaagttaggtcttgatgcagcaatatgccaaccttttgttagtgggatctaccatagtattcacggttctacattcctattactcactttccaccagtaagagctagcatggtgaaagaaaataataatccaccaataaacaaaatgactcgagctttattgcattttgcattctagatttcatagacaatcaaaattgtatatagtcaagaatacggtaagtttatcaatcatatataaacgataaaaaataagaaacaaaattatgtctgtgaagattatgatttaacaactatacaatcagttaattattctcttaattcagagattcgttaaaaaattatcttaggttttagttatcagtcgaataaaaaaaggaagacggacacaattaacaagcatgagaaaagtcaattaagagtaagcatataggtgttgttaatcccctttactctcccttaatgtaacatatttttctttctaattttcttgttatttattttgtgattaatatccaaattctcttaattatttagtttatttcaaattcattgacataatagtcacaataatattgatgctaagtcttagagatccaagtttttttttactagactagcttttcatttataacgtttattttggtcgtttatatttttgaattggtagttataaactgtcacaaaatgtcattttttcctctcatctccttcccccctctcttttcaaaccacctaataaaggttttctaaaattgagattgaaacagaagatgtcaaaagataaatctaagaccaaatcacaatttacaacaataatttgtcaaattccagataaattttcattctagatccaaatcacaaatagactaaaacttgaccgctcaccgcattatcgatttgggaccacaaatgaagaacacaaatttctccacattaacattcattacaattccaaataagcaacaacactcccaaaacaaggaaaggtaggaaaaaaaaagaagaaatgaaacaccaccgcacaccatgtcgaaggcagcagttgctctcatttgccactacactgtcgccatttattgctccccctcatcttcatttgaatgacttctctctcccccaaaacaacatatctcctctccccctttttttgtgttatgtcatttattttttgttttctcccctcacgccactatgtcctcctcccctccctattgtcgcatcctacatcatcaccgactgtgtgtcctgtgtcaccattgaccacatcccttgaatcactaaatgaaacacaaacaagatatttaaggagaggtacatgtccaaaaccagcgataagtggctgaactgtgggaaaggtgaggttagggaagcatggagtgggagattcggaatttagggtttggggcttgggctagggttaaggtttagggaattggggaagaagaggccttggagtgtttgatatgagaaaaaatggtggaaggtacaagagagagagagagaacgaagatagaggtgggtgaaagtattaatgacattaatatttaacttaacggaatgatcattttgaattgattaaaaatataaaggaccgaaatgaactttttagaagataaaagactaaactaaacaacaacataaaaacataaatgaccaaaaaggtcatttggcctattttataattatatgaggagtttcatttattatgtgtttttaatatgataaaattctttgaatagtaactttaatagcataggacaccaagtacatatcttgatcatgagatcccattagataatgaataatgtttttaaatatctctaatcaaatattattgctaacaaggataacaaggataaattgagactagcatttgcataggctaatatccatgtcatacgagtcatggatatgaaatatcaagatttcttataggtacatattaaaataataatgtattatatattggctcaccatgagaatgctacatagaacattatgcaaatattgtcaaaatagattttccaagtgatcatggtgtatgtagtcctttaacttggaattgatatattaattcttgcataggaagttgtatattttaatatatgccatcaaaattcacttgtaacaaggtgacaacgaagttggaaattgtccatacaactagtcatgacaatgggacattttgggggcatcatccccatctttgcaaaagacagaacgggattgagtttgaccttaaaagagacatgtataaaattttaatacacaatttgatctccattgcattttattgggtttgagaaaatctgtgggaattttgccacacagtttttacaagtttgatttatttctaatatttaaaaaaaattatacattagttattaattatattttaatttaaaaaatatataaatgttaataaatgaaaaaataaaaatttaagaattaagctatattttgaattaaatatataattttaagtttgttatttaattattattatttaaattatttaaatttttttaaaaggtcaatgctaggtgttaattcattattttttcttagtaaaaaatattagaacccatatttctccctcccctccttaattctctcttaaccattaaaataaattattgtttctattttatttttattagttataaaaggagaaaggctagcgatactttctctaaactctcttatgacattttctctactattggttgaagtttattagtaattacaaattttggtcagtttcacttctcatcctaatttagcagtgggacccacccaaaattgtaattaaaaaatagcaataataaagagagtattagaaagagaatgttaaaaaagtgtcactagcttttctctaatatgaaataaaaatataaaaaactaatattaacaataatgtatttgtgtgtgttataacaaaaaaatttatgcaatagggggacaagaacaaggtgggacaaggagttacatctctaaactcgaatccacccttcaccatggtcaaagtaggttttcatgtcaaagagttgggtcaatggattctcacggatttaggtttgcttgtcatgtctataaacaacaagtcataaacacagatgtaagcattatagatgagattcatctcttttattgccttacataacaagaatggtatttttggaacatcttgatacaatgcatgatcatgatgaaataagtcatgtaagatattgaccttttttgtcactaatgtatctacttaagtttcaaagaatgaatatttgactatataaggatgacacatttaatattttacgtacaattatgatgcctagatgaaggggtaaaattacacaaaataattattgacatttccatttgagtagtaatgatatattagttactagatatcacttattgtttataaaattaaatgagaattattattactactaaaattatgagaacctatagggttgcatagatagaaaaaataaagtaaaagagaaattacataatattgtaatttctcatggactagacccaatcagtccatgaaggctaggtcagaccaattctttttcctcatgtatataagaaaagaatggtattataagtaattttggctgcattttaaaaaaggtgtgagaaaaattgttctaacttaattttgcagctagcattgctcagatagacactccaaactacgaatgtgagacgtttgtgggtttgttcacatgaactttgtaaaggtgttgctaccattgtagtactttattatagttctatagaagtattcccaacacttgcaatagaaaattatgatctatttttgcattcaaaattatacaacaataataaatagagaaaataggtttgtgtacccgaatgtgcgttttcgaagcaataaaaattttcttcaataatgtgaagattctaagtgtatccacattgagaccaatctatgctatcaactttttgacgagtgaaactctaaagagtaaatcctttttttacttttcaagtctaaaactaggcttgaacttttctagttttgtgtatggtacattttgcctcatgtagatgtttctatttataatgttaaagagatatggatttgaatattttttcaaagagaaaaaaaaaaggaaagattttattcaaaataatttcatatcttcatctttataaaaataaaaattatctcatatcttttattttaataagttttttgatataagacaaagataattcataattaatcacatgactaattttgataactaatcacatgatttgatcatgatatgtagcaatagaatattattcttattttatggacaacttccacatttataaaataatactctttttatattaattacattctgttggatatagggggagcaacaaaaagaatgaagcttatgatttaaaagaaagttttgagtttttcacatgccttgaagntcaatcttttgatccttgcattgcatgcacaaaatcatttatatgcttaaatgttttcattaaagtatcaaagctattcacaatttaaaaaggaactaaatgggtaatgtttttggaaaaatgtattcttactgctttaatcgattacacagcggtttaatcgaatatttgcttcgttttaaatctggaaaaactttgatgaacatattaatcgattacataactcttgtaatcgattacatagtgtaaaatgaaagttatgcattgctgttttaatcgattaccgttaatcgtaatcgattacataagctatttagaaaaacatgtttcacttctttaatcaattaccataaattataatcgattacacaagctacttcagaaataaaacttcactgatttaatcgattacagctcaggttaatcgattattttgttcattgtaaaacccaaaatgaagccttgaacactttaatcgattaagtgataatttaatcgattacataagtcattttaattgattatttggcgcgtgtattcgattacagtctgttacaaaaagttgttataaataggaagaaggtttgtcttggatcttaacttgaatacttcgaattttctgaatacacacaagccttctcaaagttaaaaagtgattttttgggttaactaagttcttgtctcactctttaatcttcatgggtattgaatgatttcttggacaagaggtttcaaagaagttttggagaacatgttctgaaattctttttctgcaaatcaactctgattggtaactctcatgcatccatattcattggatgatcaggttgtttctctccattatctttggttgtaaatttcgtttttgtaatgtttgttatttgatgctattgtaaagagttctttgaagcttatgctagagtagggttctctagggaagaacagaatagtgttctctgcttcttgttcactagaagtctaataggattttagatttctattctttatctagggttgataaagagagtttgtcataaagcttgtaagaactgaaatttataatagtgaaactctaactagtgttgattagaagaaactggatgtagcttcttttgagaagtgaactaatataaattcttgggttgtttttctattcctttatctctattagttatcttattcatttgttcttggtattattatcattactcaacaggttctgttttgagctattgatttcttgagctgagtgatttgattgattaaaagcaatgttggtttaaaagtgattaagatcctttgactttgattttataaataaatttttaaaatactaagtttaaagcaattcagcccctcttggttattgtgggtattcctatcgttttcacattcttggtgctagcaaataatataataatattccactaaaatatttatttgattaaattaagttctttaatttaattatcaaataataatataatatttcattccatcatttacaggtcaaggttaactctaaatataatattattgtcaaactctaataagctaacacatttaatcaatgattgacttaagaaacttttttcttctttaattcaattgtccaggacaagatcttaattctatcatagagctcaaactcattacctagagttgatggattccttcttgattaatcattaattttacaagtatttaatcatatccaatattcattcaactagtgtcctaagatattaggtgtccgaaattaaaacacaataaataacttgttaattactatgatattttcatgccaaaggaaactattatatttctttttgagagctttctgttgacatatcaaggtaatattaacggttaggaattcttaattgagtttgttcaatgataacatccacatgcacatcatctatacatgcaatttaataaatgatatctattaatctttatccaataaagatcattacatatatattgatctatccagattatcgatatcatatttacaataatcatatgatcaagaacaatttagattaaaattatagagaacttgtttctcattattataatctctatcatgataacaaatatctaattttaatcaaggacttgtcaaattaacaatttaataaaataataaatatgataataaaataaagaacaattttttactaaaattgataacatgatagattgaatcttgggcatatacatttatcccaacaatctcccacttgcactagagtcaatcactcgtgtatttcattactaatttcaacttatgctcatcaaactactttagtttttaattttgagtctttataaatgaggtgtaatctttagttcttcttaagtacttaagaatggtcttaccaactttcaatgatccccaccaagacttttttgatataacttgttacacctagtgcactaatgatattagaacatgaaaaaatcatgtcatatacaaccgcttaccgctcccactattctagcatatggtactctagttatgtattctctctcttcatgagttttaggacaatcctccctactgagagtaactcctattcctattggcaaatagttacttttgaagtttccatgttatacctctttagaatggtatcaatgtacctcgattgggagacaccaagcaaccttctagatctatatcagtaaatctttatttcaaaaatgtaggttatttctcctaaatgtttcatggataatatattagtagccaaatctttcttccttgcattgtgtattattttaaatgtcatctacatataaatgtaatgctcccactaacctttttgtactcacaaagttcttcatagctaacaagattgaaccattcaattatattgtaaaaatgaatattccaacttctacacacttgtttcaatccataaatgaacatggaaacttgtagactttattatgatcagacaagggtgtgaatccctcgggttgtatcatatacgcatcctcttttaactcaccattaaggaaaaccattttccacatctatttcatatttcatgatcctagtatgctactatagcaagaagaatccaaattgatttgagtattgccacgggagaaaagtttcgccataatctataccttccttttgacaatatcccttggcaataaagctagcttagtaggtctcaacctttctatctggtctaatcctttttcttgtaaacccatttacgaccaattggtttaatatcctttgaagcttcaattaaaagtccatactttgttgatcttcattggttccactttggatttcatagcttcttgccatttcttacaatccaagcttcgcgtagcttcttggatcatcatcatcatcatcatgataaacctcatttgttgtgtcatctaggaccatcaagtttaatctatcaggtgcacagtgaacttgagtaaatattctataaggctcatgaattgggttcataggttgttgaattggctctaagattgattcattaaactgatcttgaactatagctggctcttgaaccataattgttggaggtgatgacatttgtgataaccttagaacattaaagaaaggtatcttagtttccatctcatagtcctaagttgtttcattggttaattgagtttcatctagctcaatttctttaccatgacttcctcctgcaaggaatttcctttctaaaaaataactcctcttgccacatactctttatggttagaaggttaatataaacaatatcccatgatttctttgggatacccaatgcatctacatttctcagaccttgccttaagtttgtctatttgcaatctcttaatgtaagtggaacaatctcaaaccttgctatgtttgaaattcatactaaccctttccatatcacatatggagttgtagatactaattttgtagaaactttatttggcaaataagttattgcttctaaatcatatatgcatataaacttactagaagatcataggtgacttgattctcatagtcaattagcatattaaacatcttatgcatggaaactattcttaggtaactatactaatcatcataattggttccaaccaattttgtttcaatatttcttttaagtggaaaatttcttaaaactatgaatgagtcactcggttatcaagtcgcttctcaaacatattctaagacaaaatatatcacatatatttttctaagacatgatgtatcacatgcactttgaaaaaataatcatactataacacccccgtatgcatccggtgtattaacgattacttaatcagattagcgcagtaattaatttaaaatcaattatttaaaaccacggaagcattttcaaaaaaacatgatgtcatcgtcattcctttcaaaatcatattctgactcatcatgtatggtagtatccacaattacatatatgaatgccaagacaccacagcaagcctgtacgatccagagaacataaagaacgacagataaagacaataatgtccatacagatatatcaggagaagcagaagccacatatatatatatatatacatcatcaaaacaaccaccgtggctatacaaaagaatagacatcctgtgtcatgatctcccagatcacatcctcacaagcgggtacaaaatatacagcgtctatatatcacaatccatacaggatccaaaacataaatatatacacgtgcatcttccctcgcaggggtacaaaacaacatcataaacataaaacggtgagtcacaacgctcccaaaatactgcccaagcagctatacaacatctgtccctattggggcctcccgccctgagacccatcatctctgccagatgcatcatgtaacaccccgtatgcatccggtgtattaacatattattatatcagaatagcgcagcaatatcgtatatcataaaaatggaagcttcaaacaaaatgacgtcatcaagcgtcattaacaaaatcaactgtacattatatacatatgtgggaaattcttacaatatacaaggtataatagtctcaaaactgtacaaatatcccatcagggtacaaaatacaggcataatcaaaatcttgagccaacatgctcagcactctatgcctatggttatcaaagaactatccctactcaggtcttttgccttgggatttatcagttactcctggatcatcacctgcaaacatgagccccaacaggggtgagataataatctcagtaaactcagggtccttggaggtctttcctccctctgattcttttccatgcttatgtaatataaaaaaaaattgcattacaagagccatcacagctctgctataacatatcacatgtatatcatacaaggtaacaatatatgtatacacacatcacatgggctgagagatcaactatctcatggatagattctcttaaaacttcgtccaatgcctaaggaagatcatctgacaggtacgttacctttaggacttaattctgttgcctaaaggagatcatctgacaggtacgtttcctcagaatccgattggatgcctattacgaaggaaggtcatctggcaggtacattaccttaggacttaatctgttgcctaaggtagatcatctgacaggtacatttccacggaaatccacactattctattctactggccagagaattctttcaatcacaacaccacactatcacagtacatgactcatcatcaaacacagaacactatcacagtgttcctcttattatcaatctaatgattcaataaaacaatacacctagtctcaacaaacacacacacacacacacacacacacacacacacacacacacacacacacacatatatgtaatacaataaccatcacccctttagggtatggtggaatacaagtaaaggaaaaactccaagaacaatgagcttacctgatctcagctcaataccggctcttccggcttcgtggtcaccaccaccagtaatgtaaatctcacgccctacaccaggcatgcagacaaatcatcaataacggtccttaaccgttataatgaaaggaaacactattcctttctatactaacctcttcgtcctctatcttagggttataagagtaaaccacattataggcgactcacagacccttagcaggatcttcctcaacctaaccaaggccttagggtctctctaagactctgtataagtcaattcaattatctactagtttataaatcaacagttgttccaacatagctaaaacagatataccaacacgttttcaccgtttatttggctttatgaacaacttttgtaaaggcacttaggttcatatatatcatagtaccttccattcactcaatcttcttcctacccacactaaactcaaggtcaaaaacaaacttcatcacaaatcaagtttcaaagttccatattcctcagaacaacctcctgagcatacttttctaaagaacctaagcctaattccagccttatcagaaacaggttactattcattccattaccaatttcacaaattaaacggtgaaatcttaatttcttacctccaatcagtcgaggaaggtttggaggatcacttctctcagctctggcgtccttgaatcgccttcttttcctcccaaaactcagcttcccaaagtcccttagggaatggaggttcttggttttctcttggaatctaggctggaatctagctcataaaaggttctaatcatgttctttggtagctaaggagtgtttagatgaagtatggaggggttatgaagctttcccaagcttcaatggcgtttttggggtcagaggaagaagatggaagggtttttcccttcagaaacgcgtaaaatggccttttatactggcccagacgtgttatggcgctaaccgtgccacttctggcgctgatcgcgccagattccagagaaaatacactttctggaacacttatggcgctaaccgcgccacttctgacgctgatcgcgccaaattccagagaaaatacactttctggaacacttatggcactaaccgcgccagttctggcgctatccgcgccaaaatccagagaaaatgtgttttccagggcacttctggcgctaacggcgccatatttggcgctaatcgcgccacaggtcacattctggcgctaacggcgccgttcctggcgctaatcgcaccaaaaacggtgaaaattggcctgcagctacagtgccacgctatcagcgccatatcccacgctatcagcgccagataaaataatattaaatttttttttttaagaaaacttgtttattatacatcacctgcaaaatataatctccacacacggggtgagatacaatctcagtaagctcagggttcttggaggcttctcctccccctggcttacttccatgataacataacatcaaaggcatcgcaacaccaggcctcctggccctcacaacaacacagacattctctagctctaatgtgtttatgcggtactacgcccgccaaagatgcatcatcctcagcatcgggactctcagtccccaatgtaaggccggaactcacactcgtgtcatcccatcgggagttaccccttttcacatggatgcacgtatatggcaccttcaagaataggcttcaaccgcgatgggaccacctatctctggtattaagggatcatacaccctttacgtgagcaaaccgactaggagttgcactctattcctaaggaggtccatatctatctaactggccagaaggtctatccgaaaggcaaccatacacaaagcatagaaacatgcatacatattatcatgaggaaagctgtaacatccaattcaatgcatatgaatcatgtatgcaaccatgacttcctcggagtatagtggaactcaagtaatgggaaacactcccaagaacaaagaacttacctggcaaaacagtgctctgctatccaatccctgaactgtggtctccgccactgacaccctcggtgtcacgccctatacaaaggcacacaagtaatcaataacggttttcaaccgttagaaaatgaaagaaacattattctaacattattctcttccattaaaaccccttattacacttttttctagttataaggactagtcacctaactggtgacttacagaaccagtgtgatctatctcggcctaaccatgacactaaagtctccccaagactctgcataagtcaattcaaagagttcaatactctatccatgccacatttgaatgattatcaaagtgcctaaaacggttacttcaacacattttcaccgtttatatagtctcttgatcacatcttgtaaaagcaccaaggctcaaacataccatattatcatcaatttagccaacattcttcctacccatacattcttcagagccaaaattccaaagtccataaaaattatatttcaaggctaaaccttcacacaacaacctcctaagcaaaggacccaagcctaatttcagctctaactcaaatggatcactattcatctcaagaacaaattcttaaataatcggtaaaagttgtctttcttacctctaaaacgacaaggaaggctagaggacaacttctccaagcttgaatgtccttaaaacgccttttttcccctccaaaatcaaactttgtgaagctccctagagaaaatgatctctccgtttgatgattttcaagggaaatggaggttggaatctagctcgttgagtagttcccttcaactttcatgttggaagcgaagtgttttggttaatggttgagtgggtatgaagctttccaagctcaacagtggcagaaaacgaagaagggagaagatgaagtttttagccccaaaatcgcgaaaatggccttttatagtgaccctgccgcgttcccgtgctaattgcgccactttggcgctatccacgccagattccagagagaaaatggcctatggcgcatttcctgcgctactagcgctaatcgcaccggaaaccagagactctggcgctaaccgcgccagatttcagagaaaaatggccttttggtgcactctggcaatgaatctggcgctactggtgctattcgcgccagattccagaggcctccaaaaaaaaaaaattagtcttggtcattatacataccaaataagtacctagttgtcaggtccatcctattggtatctataaattaaatttaatactttctcaggtagtctagatgtttagtataaaatataatttcgaaatccacgtctcatgttatattaattagttataagtctccttattgtaaggtcgttccttattattaattaaataaataacttgcatcacatgcttttattttaagttataagtctccttgttgttagatcgttccttgtaataaaaataaattttgtcgcatgctccaatttatatttcaaattataagtctcttgttaatcaagtcgttccttgtaataaaataaatcaaaatagtttgcatcatatgctccaatttatttttaaaaccataagttccttgatattctagtcgttccttgtaattaaactatttaatataaaaaaaattggataatacatcaccatataataaaacacatatcatcatatgtatttccataaagactacaaataacatgtggagaaacaaaattttgctcctaaaataagatttttatagtcattgacaagatacaacttgaattaaatcattttaattcaaaatcttatttctatgttagttgtttgtaatagaattaacttttgttgtcaacttctttgacaagcggaacaaagaaaaaaaaaaacnnnnnnnnnnnnnnnnnnnnnnnnnnnnnnnnnnnnnnnnnnnnnnnnnnnnnnnnnnnnnnnnnnnnnnnnnnnnnnnnnnnnnnnnnnnnnnnnnnnnnnnnnnnnnnnnnnnnnnnnnnnnnnnnnnnnnnnnnnnnnnnnnnnnnnnnnnnnnnnnnnnnnnnnnnnnnnnnnnnnnnnnnnnnnnnnnnnnnnnnnnnnnnnnnnnnnnnnnnnnnnnnnnnnnnnnnnnnnnnnnnnnnnnnnnnnnnnnnnnnnnnnnnnnnnnnnnnnnnnnnnnnnnnnnnnnnnnnnnnnnnnnnnnnnnnnnnnnnnnnnnnnnnnnnnnnnnnnnnnnnnnnnnnnnnnnnnnnnnnnnnnnnnnnnnnnnnnnnnnnnnnnnnnnnnnnnnnnnnnnnnnnnnnnnnnnnnnnnnnnnnnnnnnnnnnnnnnnnnnnnnnnnnnnnnnnnnnnnnnnnnnnnnnnnnnnnnnnnnnnnnnnnnnnnnnnnnnnnnnnnnnnnnnnnnnnnnnnnnnnnnnnnnnnnnnnnnnnnnnnnnnnnnnnnnnnnnnnnnnnnnnnnnnnnnnnnnnnnnnnnnnnnnnnnnnnnnnnnnnnnnnnnnnnnnnnnnnnnnnnnnnnnnnnnnnnnnnnnnnnnnnnnnnnnnnnnnnnnnnnnnnnnnnnnnnnnnnnnnnnnnnnnnnnnnnnnnnnnnnnnnnnnnnnnnnnnnnnnnnnnnnnnnnnnnnnnnnnnnnnnnnnnnnnnnnnnnnnnnnnnnnnnnnnnnnnnnnnnnnnnnnnnnnnnnnnnnnnnnnnnnnnnnnnnnnnnnnnnnnnnnnnnnnnnnnnnnnnnnnnnnnnnnnnnnnnnnnnnnnnnnnnnnnnnnnnnnnnnnnnnnnnnnnnnnnnnnnnnnnnnnnnnnnnnnnnnnnnnnnnnnnnnnnnnnnnnnnnnnnnnnnnnnnnnnnnnnnnnnnnnnnnnnnnnnnnnnnnnnnnnnnnnnnnnnnnnnnnnnnnnnnnnnnnnnnnnnnnnnnnnnnnnnnnnnnnnnnnnnnnnnnnnnnnnnnnnnnnnnnnnnnnnnnnnnnnnnnnnnnnnnnnnnnnnnnnnnnnnnnnnnnnnnnnnnnnnnnnnnnnnnnnnnnnnnnnnnnnnnnnnnnnnnnnnnnnnnnnnnnnnnnnnnnnnnnnnnnnnnnnnnnnnnnnnnnnnnnnnnnnnnnnnnnnnnnnnnnnnnnnnnnnnnnnnnnnnnnnnnnnnnnnnnnnttttgatctcaaaaaacaattttgcaatcttatattacaatatatacatttacgattttgatctcaaaaaacaattttgcaatcattacaatacaatttaataaaacacattttttattattcacaatgaagtcaattgcaataaaaggttttgtaacaaaaaaaatgcacacacatgatgttttatatttggaccagactttcttcccaaaaataagagatatcacatatctaataatctaatataatgactatgcatctccgcatgtttctggttcaaccaaaacacatattctcacaacaattgtaatatgcttgatgataccaagcaaaaacatattcacttttagaagaaaaacacatttcatagtataattttaaatacaaaaaacccatggttctcataccaattgatagttacatagaagtgttccaaacacttggaacgaaaaattataatcaatttttgcattcacaagtatatgacaataacaaatagagaaaataggttcgtgtacccgaatgtgcgttcttaaagcaacaatttttttcaatagtgtgaagaatctacgtgtatccacatcgagaccaatatatgttattaactctttgatgagtaaaactctaaagagtaaatcttcttttcacttttcaggtctaaaactaggcttgaacttttctagttttgtgtctgatgcactttgtcttaggtaaatgcttctatttataatgttaaagaaatatggatttgggccttttttctaagaaaaaaaaaagaaagattttattcaaaatacgttcatatctcttcatctttataaaaataaaaaatttatctcatatcttttgttttaagaagctttctcatttaagataaagataattcataattaatcacatgactaattacaataactaatcacatgatctgatcctgatatgtagcaatataatattattcttattttatggacaactttcacatttataaaataatattaattttttatattaattagattcttggtgctagcaaagaatataataatatcccactaaaatatttatttgattaaattaaattctctaatttaattatcaaataaattatttttcttatgcaaaaagattgcaacactttcttatgtgactctgtaggttcaatattaaatcgatagtaaattaatcatgattaatttattaatcaaggtaggcgtctagtaacactcctttacgtccagatagtataaagtaacatttattaccttcaagaaccaatagaagnnnnnnnnnnnnnnnnnnnnnnnnnnnnnnnnnnnnnnnnnnnnnnnnnnnnnnnnnnnnnnnnnnnnnnnnnnnnnnnnnnnnnnnnnnnnnnnnnnnnnnnnnnnnnnnnnnnnnnnnnnnnnnnnnnnnnnnnnnnnnnnnnnnnnnnnnnnnnnnnnnnnnnnnnnnnnnnnnnnnnnnnnnnnnnnnnnnnnnnnnnnnnnnnnnnnnnnnnnnnnnnnnnnnnnnnnnnnnnnnnnnnnnnnnnnnnnnnnnnnnnnnnnnnnnnnnnnnnnnnnnnnnnnnnnnnnnnnnnnnnnnnnnnnnnnnnnnnnnnnnnnnnnnnnnnnnnnnnnnnnnnnnnnnnnnnnnnnaccattacatatatgttgatctatctatattatcgatttcacaataatcatacgatcaagaaaaaattagattaaaattataaagaatccttttctcattatcataatctctatcatgataacgagtttctaattttaatcaaagacttgtaaaattaacaatttaataaaataataaatatgataataaaataaagaataattctttactaaaattgataacatgatgaattggatcttagacatacacatttatccctaacactttagtgattcaaaagcgaataagcgatcatgaatgcttttgctttaaaggtagcaataatatttgaaaatatgaatatacacttgcacttgaattccttgatgggaattttttcgtaatgacatggttttggtttaggattccagcaaataacaattgtaaccatttgtagtattgaatttaaatttcaaaatgtatacaaaaatagagaaaagtattttaaaaaaagatatgaaatagcaaatccatctttaattagagacgaaattctacattatactattagagacaaattgtatattaattttagagacaaaatgtataatttgtctttaattagagacaaacaactttcaaacaaagacaaattgattttcttcaatgcctaatcttagtgacacaacatgccaatttagggtcaaagttatatccatttagagacagatagagatttctatctctaatgtttttacaataccaattttagcaacatatacaaattcttgtctattatgtactttaatgaggaatacatccataataagtggaaaatgtttctccctaatttcgacttttataatagtgaggtctcaaccaaatttatttaactcaaaagtaattcacttcttagataaagttgttgttttacttaatttaatcctatgagacattaataacaattgagtttaatttatatccacttacattgcaaaaatttctatattgttaaccaatttaaagttatgatagatataattttaaagtaattactataaaaattaaaaaactaaccatacatattaatttataattaaatatcaatgtaaaaattcttaatattatcagggtatgaactatttactcttaacatttcaatacaaaattaagatgaattataaggtggatcacctttgtaggtaatccaccatgcaccacaaatcacaacctatgaattaatctctagtgtatactcctaccttagaccctctccaccaaacttttttcttctttctccctccctttacattgttttgttatccgaccaaccaccaaaactcaccaccgcttactgcagttggaggtaatttcctatggcaacaaacttctctctctctctctctctctctctcttcctctctttgtttcttctcctttcttcctctttctcactacaatcttcacctaaacacttcttcaatgcacactttttattttatcaacacaaaataacggaaaatttttactccaaaaatgtgaaacgaaaagtcaatcaacaaaaacttacctacagctcaatgatggcgacaccagcaaaaacactaacattgacaatgctagttccgaatcgaatgagacatcatgaaaagcaagatatgatacgccgccgctctctcacacctcctccacattccataaaacccaatctaacattaccaaactatgtggctcatcgatcgtcacggtatccctccatggtggcatcacaagttattgaggttttgggtttgggtgaagatcatatagagaaagaggaagatgggataagaagaaaaagaatgagagaggaagagaagaaaaaaaagttgccaccacctaaaatcacctttagcaacaactagttttggtgaccagttggagaatggaacgaaataggggaagggataaagaagaaaaaaactggtagagaaaacctagagtaagatagtacactacaaattaatccaaaagattgtgctgcatggtggacgaccacctataaaggtgattcaccttagaattcgtccaagattaattcattctttggcaaaaaaaaaacttttttatcttacatcttttcaaatggaggattgttggtataattagtggcatatccactttaaaaattacataaatatcttgaatgtatatattttactccccctaattttatatatttgaatcccctatccttgatttttttacttctttcatgataatagttattaattttactttttaatagattgttcccttgacttaaagtcctagattcgccactaggtataatgacaacgcaaatgagttcatataaaatatataccaagttcctttttgctactaaaattgttagagataacattttaagagaaaaaggattatgcactgataatgtaaaaaatgttacacaattattcaatcataattttattatcacttgatactattttatatgacccattgactaacatgaaaaatgaggatttattgtcacttggtactattttatcacatcatgagacattttaaaacctaacaattataaaacaaaatgctaaactttattttatgttattgttttttttatccataagaatcaaaaataatcataaaaaaatttataatactcatatattttatattctgtttaaattctcttgtcattgcttttatgtactattcttttctctttaatatatctatctattttctcaacttgtttcctttgtgtttctgaatgcatgcacaagtccaaatgtgttgctttattaattaattttggagagcacaaaagcaaatatcaggttatgccaaaaatctgccagaaacaaatatgaggttataatacgagacaacaacttaattgttcctactccaactatcatggaccactaaagatattaatgtggtcgttctttcttctttcctagtaaaatcatcttctctggtctagaatcctctactttaatcgttgttaattattatagttccatccttttcattttggaaaggagaaaccagatttcaaaacacaaagagaatcaaacataactcttcttgcattctaaataaactacaagagagaacggtggtccagagtatataaagttcttggaattgtgatatcatgtcttaaaatataaataatagagtatggtcgtttctgattaaaaatcttaaaggttatttctttatatttataatacactatgaagatatttgtattatatgaatatgaagatattaaattttaagaaaaaaatcatttaacataaatctataaatgtaacacattagaaaaaactaagaactaagatattacttgttggtaaaaagaaaaaaaatatatcagtactttataatcatatgttatattttaatttaaatataaaaaagagataagataaaaaaaaaagttagtctgtttttaaaaataatatacaaataacataaaaaaactatcatacaattataaaaaaaatatttttgggaacttctttttattcttattgtggccctgggtgatcacgtccatttgccaccctagggtcagtcttgattaaaaatggcatgtattagagattaaaaggaattaaaattgtatgcaaggatagggatgacaaagtcctggactctacagggatgataaagtgctcctacaaaatatctacaaggaaatggtaattactcatttattagaactaaggataagaatagacatttattcataattttttccaggaatgagtataagtattatagtattcactcttttctgcagatcctcttctgaaaaaataataattatattttctaaattttatgattaacggtaacgatctaatatgagttatacatgtttggaaaaaatttatggatatatataatttgttaaagaaaacatgcataacctaagtttaaagaaaacatgaatgtaactttcaaaaacctgagcttcattaatagaaaatttgttaattaacttaattaatcattaaaataaaagttcaatatataacaattactactactaataataaaaagctctagttgcgaagaattttgtgcttatcaagagaggaaaaaaaaaatagttgtgaagaatctggtgtattcctgtgcatatactactatttatgtcaatttcatatttaacttttgtgcttgtagttggcctgcacttgtgcggataaactcgaacatacaactgtcacaatagtccagacattttccaatagaatccaaaattagaaagaaaaataaagctacccaactttatcttttttttcctccttttcctttattctttctctctttctcttactttttatttagttgtaaattcagccctggccaattatattggtagcttgttaaagcaacttttatcttctatttgtttctgaggatagacatttgtcaacttcagctgttctacaagtgtccctgaaatcagagtcagggatgaaacacagatatttcataagttgttttcatgggaaggagaccacaaatttttatgcacttgttgctgttgagggacccacctcatgtggtggcattatttagttgctgcgacctttctgttgcatccttttggcagtcctttcctaaatttctggcagaactctaaatctgtcagcgtatcttgattttggctttcatcaaatgaatggtagtaatttagtaaatagttgcatgacttactctatacttaattgtagggttgtaacatgtgatttaggttggattgaatttattttatttttttacttaatccaattaaatttagtatatgtttaggttaaaatttataaacttaagtttgagattaaatttaagtttgcagacagagtttgtaaaaaaaattaaaattttacttctccataattgagtttttaagtaaaaatttactctcaatcatacttttgagggataatcaaacatgactcaaaactcattttactcccaaatgtatttttaaaactttctcatcagaaattcaaacacatccttaattgagttggattgaatttatcttatttttttctacaatccaactcaatctaatcaaactttaattcagttggattaagttattaagttgagtaattaaaaaaaattcacctctttaactcttgaaaaattattagaaaatacctcaaactaaaaaaacaataaggaatttttcaaaatcagtattttcaaattatggtttgtaactactctttgatatagggtccaagagaagaagtaaaccaccatctatcaaaatcttgtaacatcnnnnnnnnnnnnnnnnnnnnnnnnnnnnnnnnnnnnnnnnnnnnnnnnnnnnnnnnnnnnnnnnnnnnnnnnnnnnnnnnnnnnnnnnnnnnnnnnnnnnnnnnnnnnnnnnnnnnnnnnnnnnnnnnnnnnnnnnnnnnnnnnnnnnnnnnnnnnnnnnnnnnnnnnnnnnnnnnnnnnnnnnnnnnnnnnnnnnnnnnnnnnnnnnnnnnnnnnnnnnnnnnnnnnnnnnnnnnnnnnnnnnnnnnnnnnnnnnnnnnnnnnnnnnnnnnnnnnnnnnnnnnnnnnnnnnnnnnnnnnnnnnnnnnnnnnnnnnnnnnnnnnnnnnnnnnnnnnnnnnnnnnnnnnnnnnnnnnnnnnnnnnnnnnnnnnnnnnnnnnnnnnnnnnnnnnnnnnnnnnnnnnnnnnnnnnnnnnnnnnnnnnnnnnnnnnnnnnnnnnnnnnnnnnnnnnnnnnnnnnnnnnnnnnnnnnnnnnnnnnnnnnnnnnnnnnnnnnnnnnnnnnnnnnnnnnnnnnnnnnnnnnnnnnnnnnnnnnnnnnnnnnnnnnnnnnnnnnnnnnnnnnnnnnnnnnnnnnnnnnnnnnnnnnnnnnnnnnnnnnnnnnnnnnnnnnnnnnnnnnnnnnnnnnnccaggtgattgccaaatcatggaaatataaataggaaccaaatttataacaaattgataatttaggaaattatataagattaaacactaatgagtccaattcagatagatgttcaccaatgtgtttggtttaatcattttcaatataaaaaaaatcttttcaaaagtatgtaaatatgtttcaaaatttagattccaaaacatatatttttgggaaataaatttcagaaatataaatacttcacattctttctaaatttaatttttgaaatattgaatccaatacaaaattattgttgaaataaaatttgactaacaatgtgatagaagtgggtgtggttgaattttaacccttaaaaaaataggttaaaatatatttttcgtcctcataaaaatgaaaatgttcgaaattcgttttaataaaaattttaatacactttttgtctcatcatattttcggatttagccgagcttacattcaggtcaaaatacgatatattttaattttgtaacgacaaaaatatattaaaaattttagaagaacaaatttcaaatcctttcatatgtgaaaaatgtattttataaataaaaagtatgaattttcatacttacttatctttgaaggacatctcttcttcttgcacctcttttcttctcttcacacttctttttcttttaccttttagtttttctgatattccagaaatacccatcctctctcaccttctcccctcctctgcaaccccactcccgcggccgcaccgccccaacaacgccaaagacatctctgcaagaaaaccctacaaaatctccctactttcaaatctcccagtgaaaatgaaagtaatggcaatgatattgctcatatttctcgtctactttgtatcatactcctcatcttcatctcagaccacaatgcacactaataattgggctgttttggtctgcacttctcgcttttggtacatcaccaacccttcttattcttaatattttttcaataagatcaaattttgaattatactttaactcaagttttttttttttagccactgtaattagggcattttggctcttcggtgggaccccgtggtatcccataaccttctgtccgttttttcttggttacgagactaatcctcgatctgaaacttagtcagactcgctcccctaaggattgagttttttttttttttatgcacggttaggttagtatagttactgaatgtgatgtggtgcttctctttgtcaggtttaattatcggcacatggccaatactctctcattgtataggtactgttctgtatgttctccagaacacaaatgtataacaccgaagtgctatgtggttgctgtttgatcactctaactctgcaaatccaaagatatcaatggggaatgatatcttgaagcagaagatcacagagatacaccaattgacgtggggtgtgtgctctgtgtaattgaaagagagagagctagagtgtgtgtgtacctttcaccaacgagcaagctatatttatagatgaaatacctaaccgttggataactgcattgtgcgcgagtggcttcctatatttccggcctccacctgcacgttcataactacctgagtggactgagtcttggtccacgtacgtatcgtaactaattgggccttaacataggcccaattatgactccagaacagttgccccccagcccggttgccgagtacactcggtagccggggtgctttctttgacgtcacggttgttgggttgacagtctctccgactacaattatctgccttgttatagattacggatacgattctccgaccacgtttatccgggttcaccctatccagacattttgtgggcgaccctatgtaattgtcctactcagtcaacatccgaggtcggaatcatatccctgttgaagaaaaagatatgttgccgaccctattccttaggaggatcgtgtccagattttcggcataaagcatagtcgacctacatttcatccggatagccatcctcggacgaaatgcccccagatatttatcccttgggttttgaaaagctgttgggcttccaccctggcgtcgattactattctttataattaaaggtaatgaatgcatttaatgcatctgtctctttactgacctggtgatgattgttatggacgcgactttaccataatgccctggtgtcgtttcagtttggcaactgagccgtttcttttcttctggcggttactgaaaactgccctcactttttcaaatttgattttcaaaactgcccattcgtgtctactactccatcgcttgtcatttctgcttatttctttttctgtcacttcctcttttcctctctttatcctctcgagtgtttctttgcgccttctgcaaaatcttccttcgtttttcaatcaccttcaacttcttcgttatcaacaggttagtatcttcttctcttctttttctgcattgtttgttgttttggcattgttgtgtttctgtcgatatcatcatttctcaggatttctccacagtttctttctggctattctttagttcttgagtttttcttcacaccttttgggcttctgggtttcgtctttcttctctggtttacttcattctgtgattattcatccttgagatactatgaaattcacccctgaagaagaggcggagatacgcaggaaatttgggccgcgttccgcttggctgctatatggccttccacttccggcggggggaaaacccaaatgaccccctgcgccgccatattggcggttccttttcttccaaaaagcaaggaaccaccgcctctctcggtggtccatctccttcatttttcccactacatccgggtcctgtggaccctaacccggaacttccagggccaatagtgtccggtcccatctcctctgggaccgcgtcttctttgggcccttcttttcttgggcccaatgttgacataggtaacccccaaaatctctctttagtcccttctagtcgtaatcccaatcctccgggtagcccttctcctcgttccgggtacgaatcctcctcggatggagtgatgactattgagtatgaggcctgcatgaactgtgtgtccgaggccgttaactttatccaactgggatccgacgacgttgcagattcaatccttgggatgtgtcgtcataaccctgttttgcgtcctgctttcaaaggctcgcaatctgggcggcccgcccatgttgtcgtcggcggggtttcggcctcggtttctcatgattttaatgagttgtccccaggtacgttttactaacttactttcttacttcattttcgtaggtataatgggtgttactcccgacatagtggacgaatctgcttcagtcgagtctcagtccgaggtccccccagcgttagcgtctaggttcccctgggtcacccatgagattcttcgaacctcctccgcccttgatcttcatagtatactgtcgaccccaatggggaggcaggacgggtttgtcctgcaggctcccctacccggcgagccatttcgtgctcaacgggagggtaacgatcctaatttcttcttcttttttcaagatgtagtaacccaaataggtattaccttccctttttcttcttttgaaattgaagttttgaaccaccttcgggtagctccttcccagctccatccgaatagttggggttttatccgttgttttgagttattctgctcggatttgaaaatcccgtgcacagtccccctcttcttttattactattctcctcatacccctaggacgggtagggagccttctaaccggaagggatggatttccttccgcagtcagagtaaaaggaaactctttgagcctttttcggattcgttcaggggcttcaaagacaagtatttcaaagttgttgcgtcgccccattgtcaacccttcttcctgtctgggcctgagtcttctgatgtggagtgggtctttcctttgtactggtcacaagaccattataaacaggatcactccaattgtcgttttatcgaggaggaactgtccgactcggacgcctcctctgtcttcgtcatttctgaatttgtgggcgctcatggtcagcccaagacttctgactacatcggcagcgggcgtcaaactggtctgctttggtaattgtattttcttggttcacacttgaaatttatgctaatcttgtaaatttttctgattgtagccggcatgggatcccgacctcccccaaagtccaaaaccgacgcggcccccctttccaagccgactgaggccaggggcaagggcaagaggcccgccactgacaaccttggcggcgcgcccaagaaacggggtggtccttcctataggacattttttgatggcggccccccagttttgtcgttggatgcgccgtcgactacacagcctgcccctgcacggcctgccccttccccgacattgaatccggtcacagtgattgatactgtggaccttactgtagccggagatcggtcgcgtactactcctccttccgactcccagcagctccgggcgcgggatcgttcggataacttgtggaaaaaaggggttactgaagcgttggtccgtttgaccaagcccccttcttatatgaccaacccgggtgccccagtgggggaagagctggacgagatggtcaaaattgaggagtacgcgtaccgcagcgcctctctggcccaggctcttacttcggtccgggaaaagtaagtgttctttcaataatttattgatctctatttgctcaataagtatgcttctaagtgttgtcgtcgcagatatggggtggctttggaggaaaaggagaaggctttggaggagaaagataaggctttggaggagaaggataaggccttaggggaaaaggacaaggcctgcacggcgcttgtttcccttgaggctcaactcacttctctccaaacgcaatcggcggcggaggccaagctgttgaaggaggagctgctcaaatctcaagccgactcggcctcgttgcgggtagagttggctcgatcacggagttcccttgaagctgcggaccagaaggtggccatgctgacctcaaatttggattctgtcaaggctgataaagaagcctgtgttcagaattatgagggtcagttggctgctatgaaagcgagccttcgtgatgctgccgaggagggtttcagcaacgcccttgaacagattaattttttgaaccccagggtagctatgactactgccgggatgcatttcttggcgtatgtcgaagacgggcagcttatccctcctcctgcatccgaagagcctttggcggctacaacagaagttgtgtcgacagaagagcctactcctgccgatgctactgcttctaccgacgccgccccacctgtatccggccccgtttctgattcccagcccccgcaaaactgaaggaccggaatgccggttttatcttgtatttttctcttgaatgggcccggtgcccggaacaatgatttaaaattctttgttgggctcggtgcccggaacaattagtaaatttgtatataaattgttcaagttcttcacttaattcgtaaaatatcttgtgcgcacatctttttggttccaatgaccatttgttatatttgcatgtattgtatgtcgttcacgttatccgaccataaacaactttgctaacgaatctgttgtccggcctgatcagggccgtttagcatatcatttatagtcgttatcataccatgaaaccgtatagaatggctcaatacttatggtattcaaaaattcttgcatttatatccgttgttacaatgacaatatgtgtgtccgagtaggatcaacactttaggattacaacgatataacttattcaacaaaatgaaaattttgctcaggaaatgtcttcgtcgcgaaagaggaccatatgggctcggatagacctatccggaatccataccctcgatcacgagatcgtcctgttcgacttcctgatgaatagggaccatatgagttcgggtgttacttttcccgaatccatacccctattaaccagtaggtcgacagattaactgtaatatttcttcaacttgttcgcattccatgttcgtttgaccggcttgccttgtagtgtttctaacacgtacgctcctttatctaactttttagcaatccggtatggaccctcccagttaggtgctagttttccatcctgggcgttcttgtttccgacgtcggcacgtcgtactactaagtcggtttcttcgaactcacgtgggacgacctttttgttgtacttatacgccatttgctgttttacctttaactcctgggcatgtgctgctagccggacttcctcgataattgtcgactccagagctaagacttcgttgtttgtttcctctccggatagcaatgcttgttttcgtcgccatgactgttgtccgacctcgactgggatcatagcttcgtttccgtatgtcattcggaatggtgtctccccggttgatgcctggacagaagttcggatcccccataggacatagtataattgttccacccaagtcgatccggcctcattcatccgcttccgtagggcctccagaattgttttgtttgcggcctctgcttgtccgttggattgaggatgctctactgatgcgaaccggtgtcggatgtggaaattagccatcatctcttggaatcctttgtctataaattgggtcccattgtcggtgattacttctccgagaattccgaaacgagaaattatatttctttcgaagaatttttgtacccgggccgacgtgatggtgtttgacggggccgcttcgatccatttagtaaagtagtccacggcgactattagccacctcatctgtccctcagccggcttgaatggacccaggagatccatgccccacttataaaatggccatggggccgagatggattgcaattcctctggcggggataacaaccttggcgcatgcatttggcagctttcacaggacctcacatgttttgtggcgtctgcgctcattgtcggccaaaaatagccagccctaagtgcctttcttgtcagtgcccagccccccatatgctgtccgttgattccttcatgaatctcggataggatatagtcgactcggttcggggccacacataccaacaaagggctatgcaacccctttctgtataattctccatagaccatcgtgtacatggccgacattcgtgtcaggcgtcgggcttctaaatcgtcgtctggcaaaattcccctttccagaaaatttactattgggcgtcgccaatcctggtcggtggtaatcatcattacgcacgtcggttgcatcgtttgctgttgaattactgttcgattgttcccgggttttttggtgctcgccagctttgataggatatctgcccgggtattctcttctcgaggaatgtgattcactgtaatgtcgtcgaactcggacatcaattcttttactctgctcaggtatttggccaacaaaggccctttcacttggtatcgtccttcgatttgtgccgcgactagctgtgaatccgtgtaaacctttacgctcttggctccctgttccttggcttgcaccaatccggcgatcaaggcttcgtattcggcttgattgttcgatgttgggaagcctagttgtaatgaaatttcagttgctaccccctccgagttctcgattataatcccggctccactccctttcttgttggaagatccgtccacaaataaggtccaccactcgtcgggcattgggttgtgaggggtgagttctcggacgaagtccgccaacgcttgagacttaatcgcgtggcgggcctcgaatttcaaatcgaactcggacaactggacggcccagttggtcaacctccctgccaaatccggcttgtgtagcacctgtcggattggctgatctgtccgtatgacgattgtgtggctctgaaagtatgggcgtagctttttggcagcgacaatcaaggtgaaaactagcttctccaacttttgatatcttaattcggagtcgcgcaatgctcggctcacgaagtataccggcttctgcgtggactctacttctcttactaaggctacacttacgacttcttcgcctaccgacagatacatgatcagtacttctcccatttccggccttgatagtaccgggggtgacgctagtgactgcttcatgttagtgaaggcggcttcgcattccgggttccattctatggcggcctgtttctttagcatcttgaaaaatggcagtgctttttctgctgactttggcataaatcgggtgagagcggctattcgacccgtcagttgctggacttccttcttgctcgtcgggaattgcatgtccaacacggcgcggcacttatccgggttggcttctattccccggtgtgttagcatgaagcccaaaaattttccggccccgactccaaaagtacattttaacggattgagtcgtatactgaaccttcgtagccgaccaaaggtttcttcgagatcttcgatgtgtctgttagcatctgtcgacttgacgatcatgtcgtctatgtagacttcaatatttcgtccgagctgtggttcgaaaactgtgttcatcatcctttggtacgtggcccctgcgttcttgaggctgaatggcatgacgttatagcagtaattagccctatcgccgatgaatgccgttttctcttggtcgtccgggtgcatagggatttggttgtatccggagaacgcatccataaatgacaatactttgtacccggatgagttgtcgaccagttggtcgatatttggcatggggtaggcgtccttcgggcacatcttgttcaaatcggtgtagtcggtgcacactctccattttccgttcggctttcgcaccattacaacgttcgacaaccaagtggtatactgaacttcgcgtatgaaacctgcttgcagcagttcgtcgatatgagcccgcaaagcctgtgctctctccgaccccagtttgcgtttttttctgttccaccggcttcgatcccggatacatggctaatctgtggctacagaaagtagggtcgacgccgggtatctctgacgccttccacgcgaatatgtcgatatttttcttcagacaacggatcagcctgtccctttgctcaggttctaatgccccaccaatgttggtcacctgaccggctgaggctccgattacgatctgttcgactttctccatgggttctggtctccattcatctggggcttctcgcatatctagctccacgacgttaacggaacgtactaggttggagccattgttgtcggtgtctttctcacttttacgaaccgtgtcgtaataacactgtcgcgactctttctggtcgccacatatagtcactactcgtctgttgttgcccacgaacttgagtttctgatgtttagtggacattaggatgtcccatttatggatagccggtctccccaatatcatgttgtattgggatgggaaatctgccacgacgaactccacttcttcggacttgtaagattctctcgttcctagggttaatcgtagacggatggatcccatcacatttgtgttgccgccgttgaaaccgatcagcatcgtcttacagggctttaagtctcttacatccaatttcatcctccggaacgcagtcaacatgatgatatcgacggagctcccattgtctacgtacattcttcttaccctgcagtttcccaccgttgccgatatgaccagcccgtcttcatgtccgggtaccactccctccatgtcctgttcggtaaagtacaagagaggaggttctggcttttcgacccgggctttgaatctgggttgtgcttggaccgacaatacctctttcaagtactttttcctttgggtggaagtgtcaccgccaccacccatacctcccgagatcacgttacactcgaactcgggctccgggaactcgtcattatcttcccggggtttctttccttcatcttttcgttgactctcttctcccttgcgtttattctttcttccctgtgttcggatgacgtactgctttagccttccttcccggatgaacttttcaatcgcatcccgcaggtcccagcattggtcagtagtgtgcccgggttcgttatggaactcacagaatcgtgacttatccaatccggccttgttgaaaacggggcgagggcgttccactttcttcatttctgtaaatgcaacttccttccaaatttgtgaccgggacacgttcagtggagtatacttctcgtatttgttttcatatcttcctggtcgggattttggttcattattccgagttcgattctcgggatgtcctctattctttgggggcggactcctcctgtcatgacgctcttttcctcgtccagggttattgacgacctccatttgttctagctccaaatatttcttcgcacgagcacgaaactccatcaacgacttcaccgggtctttatatatggacttggcaaatcttgatgaaccatcgagtccggctgatattagatacacgtggactctctcctccaacccctcaacttgcagggctgcttctttaaacctatccaaataactctgcaaggtttctccgggtagctgtctgactttgcccagagtgaactcggacttcggctgctttttgctggtcgcaaaatttaacaggaacttctgtccgaaatcttcaaaatttttgatcgacctaggcgggagggtgtgaaaccacgtctgcgccgggcccgtcaaggtcgtgacgaaaattctggatattatgggctcgtcaatcccccggacacacatttgcaaatcgaattcgtcgatgtgcacttgcgggtcctgtgttccgtcgtattttgataggaaagatccatcaaaatcgtccagatatcgggccttcacaatgtcgtccacaaaaggactgttattttgatgccctcgactatacttccgacggtatatgggacccgtcttctgacagaaattctgttcgcccttcttatcgtgtccgtcatctcgcggaatcttctcattacttacccgtcgactaggattgtcgtcggggatctgccctatatcgacctcatcatgtagctcgtctcgactccgatttggttcgtcattcctcctttgatctcccaggtcggcgtcacgtcgatgagttatctgagttctcaaatcttgtggctgctctatccgcctttgaatctccgagtctgtattccttctttgattcaagtgcgtcctcaaatcttccgtctcgccctcaggatttgagagttgtacccggtcagctatcattcgcagctgctgctccaattgcgtcgttcgttgcatctcggcacgtctccattcttcattatgttcttcaatttggcgagtaatgtttcggatgtcgtcttgtctttgtaaattctgccgtttctccatgttctcaattcgggttaggattgaattgaggacattgctgactagttgtcctccgagctcaccctcctggcctatcctccgtgctataggagtcctctgttggtctgtctgggcgggagaggaagcttcgtcggaaacagcctcggtcacgtgtacttcttctcttcgcgccacattctggttctccggtaggtaaatctccctgttcggcatctccgaatgcggtacggaatgactgtttcttgtgttaaccattgttgaaaggtgtgggactcgaaatttaacgtccccacagacggcgccaatgttctgtatgttctccagaacacaaatgtataacaccgaagtgctatgtggttgctgtttgatcactctaactctgcaaatccaaagatatcaatggggaatgatatcttgaagcagaagatcacagagatacaccaattgacgtggggtgtgtgctctgtgtaattgaaagagagagagctagagtgtgtgtgtacctttcaccaacgagcaagctatatttatagatgaaatacctaaccgttggataactgcattgtgcgcgagtggcttcctatatttccggcctccacctgcacgttcataactacctgagtggactgagtcttggtccacgtacgttgaatctcaataacgtatcgtaactaattgggccttaacataggcccaattatgactccagaacaggtacgtatacaattttagcctctgttttttttgtcttaatcctctggttcatcaagggttcatcaagggaaagggaccctgattaatccagaatccggttaggaggtaagtaaagtctgatcaagaattatttttgtcaaggatcgaactcaggtagcactcaaacgattcaaccttaacttcagtacattaatcacttcacttgtgcccaatcacttgattacaattttagcctttaattgtttgagatgtgcttgatgaagtaatgatcattttattttatattctattgggtctttaacttgtttgtgattcaggacaattaagcgactaggaatacctgatgagaagattatactcatgctagcagatgacatggcatgtaatgcaagaaacaagtaccctgcccaagtttttaacaatgaaaaccataggcttaatctctatggggataatgttgaggttagttttttacttttttaggtttggccttttatgttttagtctttattttatacactatagagaatagaacatctttatgtttaccattgcaattacaaacctaggattttttgttttgcaaatcacaaacactgagctaaatcatttgtgtagtttgtatggtacttcttcatttaatcattacatttccaaaatgtggtttatcattgtttgaaaaaactttaggttccaaagctatagattaattagctggatggatgaaacttatcctcaagtcattttttgcatgtgttcttctttactttttgtttatgcttttttcttgtacagctgatactcctttggaaatgtaatgcatgcatcttagtgatcctatgatcgacagatttgtaaggttgtctagttctgaggtgcaagtctggttgaggctgcaacccaaaaatcctcactttgttggatatctctttcatattaaagttcctcaggccatctaaagtgatccaatcaaattctacccgccttgctgaggcggcaggcttgactgtctttgatagcactgttgtcaatgtaatgggccctatcttgagtttctttttattatatatagattatagaaatccaattatgtctctgaatctatctcaagaactttatctaggatatggagagtgccatattattggcctatcgttaatatgttgcttcttcatccttttttaagtttgtttggtggttgacagggtgggaaataactttcagtgttcataagctgcttataaatggctctaccttgaactagattcattatctaaaccatcttgaattttttctaatttgtgtcatatagtacattagttgggtggaggttgtctaggtttgcttcatcgagtctatctttaggcttgagatataaaatatctaaataagctttaagatccctttaaattaatttacaaatagatcgaaacatatagtgatatttaatttaattattcatacattttttttctggaggctcacgtggtactatcatgttagtaatgaaatttttttgaaatggaagtgttgatatcaagactttgcttcaaaatgagcctaactgaggtaagctggtcctggtagagaactttctttgatgatttgaatgtaccttaaaagtagtttagttcatctattgagcagttgtactgcagtagattatgaactatatgccataacttctctgactgttgcctaagtttgtctcttttgtgaaaagtctgtttacatccagaaaatatattgcacttgcatgtaatatttttatgttcatcttcattctaaatgttatgatcgctagtggtgaagaaggtacaagtgctataatgttcaatggctataacttgaaaaaggcacttgtttattttcttctctcatctaattgttctcaatatcttgtagtatttagaagagaagatatttgtgtctttctacctttttagggctttcgatatgtagcctctttcaaagataattgtttgcctgcaatggctcaggtagttatcatggatatgaagtaacactggaaaacttcttacgggtacttacaggacgtcatgaaacttctgttccgaggtccaagcatcttcttagtgatgaaggaagtcatattcttctgtatatgacagggcatgggggtgatgagtttttgaagtttcaggactcagaagagcttcaaagtcatgatttagctgatactgtgaagcaattgaaagagaagcgtaggtattgattattatccaactgtttatttgtggcctatgatttgtaaattgattacctggacgaataatttattaatgaagtatactttattggggtgatgatttttgcttacaaagagaagggagatagtgagtccttaacaaaagtacaaaacagaaaacactaaagatgaagagaaatcacaaatgatttcatttgcttatcattattgggtaagaactcatttttgactcattcttatattgggatttgttaggtttaaggagcttctgataatggtggacacctgccaagcctctaccctgttctcccaggtctccaatttatattatatgcttatcattcttgaaagctcctatgccaattcttatgaaataacagtatgtgactttgactctttttgagttttcattgtccagaattaattaacacatatcattgaagggcaaaatgttagttttagagttgatatcggtccaaatttaatgaataccttgtgttcctcaatagatgtattttgttgaatgatactcttgcccttgatggcacggtcatattttccatcactggtagaacagtgcattggttgggggcataaagaagtctgaaactctgttcctcatttctttgttgttaggctgtttagctgctgttagatggcctataatttgatgattaaggatatacacgtatgtttaaagagcatctaattctattctgaattatttttcatttgtataaatgatgattactttgctttcagtcatgggcatcgctatggcaattacataattttgctgaaaggagttttacaaatttcctatactgagggttctggttttaattttatcttcatgctaacatatacctgcatgattaattgtataatatatttccctccctcataaacatcatcatatcgtgaactacaaagaatacgaatttatccagtctacttttgttttttgttacttttcttctccttctctagattgtcttcctgggttaaatcgatattcttagcacttagtgtgtattcattattaaaatgtatagatcattccaagccagcctgtttcattgtccacctgaaatttagattgcttattatgttataataataaattcttttcttctttctagctgattgtttttcccaagttttgtttctgactgcattccttttctaagcatggcagcttcattcgccaggtgttttggcaattggaagtagtatgaaaggagagaattcatattcacatcatttggattcagatgtatgtatgaattttatagtctatcgtacaagtatttgacataatctgctacagttttccattgggtttcttcttgtttaagtccaagttctgcacaactaaaattcttttgtaattgttctttaaaatatacaggttggtgtttcagttgttgatcgttttacgttttacactcttgctttctttgagaggctgaatatgaatgacaatgcttcattgagcaggtacattcgaacttcttataagccttttcacattaagtatttcatccttgctatcaagtgtctatagagtatgtgtgttctttctttcatgttcttttaattaaattttactttccaaacatcttgttgcagttctgtttcttattctttgttgaaacaattatctttaaaaccatattggcgattaaaacttgattgacccatttttggtaaatcaactttcatgttttatatcattatcctcacttaatttttaagcaagttcataagtccagacttaagagcagctggaaatctggaatccacaaatgaaattatgtttgcagcacatcaatgaaggctaaattgtttactcagattttgtgtttgttttgcagtcttttcaattcatataatccaaatttgttgatgtcaactgcatattacagaaaggatttgtaccaacgccctttagagggggtaataaaattatggacatatttttaatcttttgctcctttttttttgtaaatttattgtttatgtggtgaggaatctggttttctaaggttaaactaatctgttagttcctgaactattaaaggatttttaattgggtccctatactttcagaagaagtttgtaattgggtcgctgaacttttaaattatttttagtgagatgcattgctcacacaataatttatacgacattttctgtctctatcttgctccacatcattttttacatctcattttgctctcgtaaaatttgttgtacaaataaatttctcatttttaattggatacctaggttagggttttgttgaattggacaaagtattcttgacccctgttaaaatacataaccagatcagttgctttgcatacctgacactgttcccgacatagcatcatgtgtagattggattccttccgtgaaatttagtgatttctttcattaataaagtatttctatcgtatgctgtctatacaatgtgttttctcatttacctccattcaagtatcatatttattctatagattattttgttaagctattacctgagtacccgagagcggaatagtaaaaccacaagcaaaattctactcacataggggccagtaggttattttggtgtttatgcttctgtaagtctatatcatttatcatgcattactgtcatttcaaaatgcaaaagttttggcagtgtatattgttctttgtgctgaattatagatggatgatttagtaacttagaagcttcaccacctttaatgtgcgagattagtggattggattgcatcagctttaagggaaaagggcaatcagtcaaatccaaatgattttcataggttatgtttagccctaattattggcttgaaagctattttaaatttaaagcttgaaagaagaagtttttttgacaatttttatcgttagaactcgtttcaaactaagttccatttcgttgtcccacttcgatttgttcaggacgagagggacagggaagttatgcatctttttttttttctttttttaaaaaaaaaaagctactttagtttgttttttcaaatctactttccccctttcatttataaaaattaagctcaatttttcaagagctttgattggattttggctcaacttctccttttaaggactagaaaagttaaaaaagagctttgccaaacactacatgataattacatataattagtttgtttcaaaatacaaatccattctaatccacaatctaaattgattttgattggattggtttttcaatattttttaatcttcaaagtgtgactatccaaattcatctagtacgagtcaaaattaatattaatcttacagatatatacatatttgagtgaggaaattaaatttggcctgaagcatgataagaaagttcttaatgtacaatataagaattacacacgcaatgtcagtttggtttggatttaattgatttttaaatttggtttgatttttatcttttagatcaattcttagattttaattggattggtttaataacttagagtgattgatgtaatatttgtcccttatgatgttttgtttgattgaagtgatgagttcttgttttgtcacttctttctaggaacctgtaacaaacttctttggctcagtaatgaaaacaatacatactgattcagcctacagatcccagtcgaataaaacatttgcaacagcgaaaacccaaataatgtctttggatcaatcaatctctgacactgacagaagaatttcgagaaactccaacgaggaggatcaatttaataatttaactgcagaggtgaatttaactcatgcctaattaagattagttttacattgtacattgtttcatgagctgaaaatcatgttaactggatttactgtgcaggaatgtctccaggatagtgttggacaacaactatggagtgctattctcagtagtgtgaatacttttgaaagcatagatgcttttgtgtgctatggcctgctttcaatgcttcctttgttgttattttccacgtgtctgttaaagtaaatgattgcagattttgcagcaatgttcttcaagtttctttgcagagaagcacatttctttgacactatttgttaccgttgcttaaaattcaatttcacaagatgaagcagattttttgagggttcagactatggagagagagcagcttcataggttctgcctatcagctgtatatattaagcagaattcatggaacatgagtccttgaaaatggcattgaacaccataaacaagtatatgttcatcgatggttctttgccttgtccagatgatttcaatctgcagcatttacatgtggatttaatctgtaataaactttaaaaaacatgatgaattcttgaagaagaggggaggggaggactaaattcacatgttttttaaagtttgaagactaaatttgtctatataataatataaatataaggaccttgatcgtgtttgatcgaaagtataagtagagactaaagtatatttttcttttttattttgataaacaatgaagtaaataaattaatggttaaattccacatttggtctccctatttttctattttgtaattttggtcttcttgaaattttattgtaatatttggtcttccggttttcaaattcgtgattttggtccatttgttaatttcactacattgaccattatatgattgtcattgactgtttattagaggacatggtacgttcaagataaaattattaaaacataaaaagtgattattgtttaattaaattaagttaaatctgccctctccttccctgcctcttctaaccttctccctcgtcacactcacatgttccttttctctgcctcgacctacatcaacatcggaatgtcattgaacaccaaaaatatgtttatgttcatctatggttctttgccttgtcaagatgacttctaatctgcagcatcttacatgtggatttagtccaatataaaaaaacatgatgaattcttaaaagaggggatattaaatacactgttttttaaagttaagtacctactacacgcatccatatccatatataaatataaaattttgacccactgaaatccacactacccatccaaagagaatggcccaaaataaatatcagatttttgttcaagggccacgtgacccagccaatttagactacttgccactgcgattggccccattccattttctattggtcactaccaagggcctggcccctttttaattcccaaattgcctttctcccataaacatgattctcttgcgcgtccattttcacattccctaatcacaaggggatcatgattctaatatataatatacaatagaatcacgattttattgtttattcttttgtcaacccaaacattacaacaaaatcacgatactatagttgtttttttggcaccccttaacacaacaaaattatgatttcgttgtactattttttaaaataattcaaaaaaatatgattgatgctttaaagggtactgaaatcacgattccattgtaatttttttaaataaatgaaaaaaaaattatggttgtacaatggaattaccattttgtagtgtcttttgttgtgattttctaaacccaaaaaaatggaaaatgtaatcatgattctgttacctattttttccccaaaaaaaaatataaactgaaatacgattccattgaacacaaattagcaggggaaaagggtcccttagagaagttggggaaggagagaaaagaagggttgggcgtggttgggaagtgaaggagcagagttggaaaggaaaggagttggggaagggaaggagaaggattaggaaagagagaagaggttggagggcacggggataatggagggtggagtttttgaaatgtgggacaaaatggggttttcacaataaggtaggggccaatagtagtttccttgcctcgattgtaagtactgaaaccaacaagatattggggtcgagttgacgaaacccaggataaaaaaaatggagcaactaaataaagcaaaaaataaataaaagataaatattatttgtacaccaattatacaatattttggatgaggtaaacaaagaaaaagttaaaggtgcatttcatttttggggtgcatgagttgaaagaaaaaagagacagaaaaaataattaaaaattataaatgggacatatatttcatttttttattatgatattgttgtgaaggattcatcaattgattatttttaatgagatctaaggatgagaatgagatgggtcaggatgagtatatctctaactccactcgatttaaaaattttttagggtcaatttcttgaactcaaacctaaatcgatcaaaattcgataaattaaggaaaagattaagccaacttgatctattattgtattatatcaatcttaacattatgtataattaaatcatagaatgaaaataaaatttaaattaagatatattttatgatatataataagtattattacaaatataatatcatattatacaaaatattacttattgaaaaatattaacaatatatatttgttaaaaaaattaaactttttaaaataatataggacttatgatcaagttggtacaacccaaaacataatctaaactcgttctcaaaatatatcaaatctaattttgaaaattcaaattcttccaaaaacaacttatggccaaattggatttggagtcgagttgggtctttatcatccttggccaacacgcaccgattttgggatattgcttcttgtatttttttttttttttctattgtgtctcattacattcattttggattgattttttcgaaatgtaataggacgcaataggaaggaatagtgtgagtacaggaagttttggcccctttttttgtcattgagattttactcattccattaataggtgtgcttcctttctttatctcaaccaaccgtcttttgtcacctgccccaacactttgataactaaaacttcacaatgggcataaaagcacaaaaacctagatactctccaatatgaaaggacaaagaacaaatttagtttttcacagccttaatagcagggcaaaagtccttaccatttcgtggtagtttcaggacaatttcctttccgacacgcgaccacgtttttttcttttgaaaggtacccttatcgtgcaacacaagcccctattgctatcaaatgtcatcctattttattaattattgacaaatcgaaaaccactttattttttatttttttgaaggggtcgaaaaccacttaagtctcaacgcatacgtacacacgcatacatggcacacaatattcatataataataaatttttacaatatttttttataatattacttcttttttattcatcacactattcaaaataccacacgattttttgttctctcttattttttatatttttcatgtttgtaattttttttttttgtgtacaaacacaaaaaaaaaaacaagagtcctatcttaatcgccaagaatattgtgtaatttattactttcattctccttttagagtcttcttcaaagtctttgtcttcaactagtgagtttcatagaaattgcacatatatttctttcatttcccaatgtgttagtactaagcaaaagaaaactatatcccactattattactttttattataaacaaggtgcttttaattcccaattcccaacgaacgcgcttattaagtactaatgcagttaattatatggtgaagctcatgtgaaggttcacttttattggctctatatatatgaatccaagaactcaaccatgcacaataagtcctgccctaacagtgaatgctaaatatatgtgatcttttttttttctatcatggagcaaacacatagcaacataattatatctggattatctttgtgtcttagaattctccttagtgatattaaatttattaatggtttactctcaattttatttttttctttgcagtatttgtggaattgggtctcacgaaattggaaaagttgtgacaccaacaagcctaggagttactcaaatcccgaaccacaaaaccacaatttgaatttgaatttcattcaacatggtgtaagattgtgcaaagaagaggtgattgtggtaatgcaaaagctgggaatgagtgttgagctagatggggatggaatagaggactttggagaacaagaaattactcaaatgtttgaaaatgaggttattagtgtggaagaggtgaaggaagctttcaatgtgtttgatgaaaacaaagatgggttcatagatgctggtgagttgcaaagggtgttgtgttgtttgggtttggagagagactttgtgcagtgtcagaaaatgattaatgggattgaccaaaatggagatgaactaattgaccacaacgagtttttcatgttgatggagcagaatttttgttgaatatatatatatatatatatatatatatatatatatatatatatatatatatattatatcctcttagtcttgcattgcaggtgatgtttttttattttctctctctctctttactttctttgggacatgagaaagaataatcaaatatcaaggacatattgtgccaagttgctttttttctttttatcgacaatggttagtattattagtttatgtcatgtttgtaagtgttgtatatataaaaataaaaaggtgttagaaatctttcccagtattgagtttgcaatgttgattctgtaatttattttgaattataactttttccatgtttttaactaataacccagttagttacctacttagcttactattagccatttgtcaatactcgaagaaaactaataagaatatgcggagtaaattaattaaggttattatgtgtataatcatttagttttttctttctttccccttctaataactgtgagaaagaaatgttaacgagggcaaaaaattcaacaaattaaacttggaaattaagaaaatatatattaaattaatttaaaatagaatattacgaggaagagataaatagtaccaacggctatttggtgaaacattttttaattaggtttaatggtaatttttatcattaaactttcattattttacaaattttattatttaagtattattttcatgaactttaccgctcgagtttcaattttgtgcattttaccaccgtgacgtgtcattatttagttatcaacataatggtaaaatatacaaaaaaattaaatgataaaatttataaaataaatattataagttgaatgataaaatttgtgaaaannnnnnnnnnnaatgataaaatttgtaaaaaaacacataggtgatgaaatatgtgttattatgaaaattagatggtaaaattcacaaaataaaacttaaatgataaaattcactaaataataaaaatttaatgataatacttaacattaaaccttttaattattggtaatttattacagctcactcgtgtacaacctgatgaatataattagtcaaaaacatctattggcatacgagaaaagttgacaaacctaccaatcctttttaatatttatatatcatcaccttttctaaaatttatctggaaattaatacttggaaagcatcatgacgagggaggtgcaagaaaaatgcaaaccaaccgagcatattggaaccattattaaaggatatcattccaatcaacaacaatagttgacacaggttataaacatttatatcccttgatcaaatgatttatgattcaaatcctaattatattttaggtataaaataaatcatattgaaaagaaatatctatcttgtgtgcacttgaggttctttatgaaaattaataatcactttcaacaatgattacttcataacaataccatcataaaaaataaaaaagtttatcattccacttaggcaattttccaaaactggataaattgaaaatacccttgtgactttcttgtgactttcacaggtgcatgcaagttttgtgcaaagtaaaacaaaattgaggggttttgaccattagggagcaacttattttaatttaccaaatgaaggcagttttttaattatttaccaattgggggtaaatgatatggatggttacaacttgacatacaaaaagttgtatgattttttagactgttttttaataaaatcgtaaactattttatgacttttgttatttttttaatttttatttttttaaaaattaaatgaactaaagtcgtataggactatatgactttaaagttgctaattatttgcaaatttaaagtcatgaattgtcctccacctttaaagtattattaattaatttttcaattaatcctaccaaaacaataaaaatacttgttaaaataatttaaataagaaaataatttactaataaaaaacttcttaaaataaaaacaacatagtacattaaaataatcaaaacaatacaaattatccacaaacataaaattaaaaagtacacacaatattaaaaaatcaaatttatatctagataaaacaagatgaaaaatcactgacacatatttagaagaactcgttgtgtgacatcatttcactattatatatttaaaaaagaaaactatgtgcattacatttttttttaaattttaagtattttgtttacatcctttctttattcccttgcaactaataattaacaatattataaacataaatatagaaaagaaataacttacaaataatattttataacattggaagaaaaaaataagttacaaaagataaagaagtgcacgacgttaaagtcccaagagacacacgactttgaagtcataggacatcacacgacttcaaaagtcgtaacctttttcttttaaaaaataaaagctaaaatcattataatggacacgacattgttaattaaaaaaaatagaagtctcaaatatcatacaacttatgcatttaaagttgtaatcatccatacaacttatttccatttagtaaataattcaaaaaattaccccatttgataaattagaaaaaacaaattgtcccctaatggtcaaaaccccaacaaaataaagtgcacacaatgcttgacatctaaggcttgaagagaagacgaaaatttaaaatacatattccgtagttattactttaacttcaaaaaagaatttgactctatatctcaatcctaatttgacattagaaatatacatagattaaagtttgaatatttcaaaagatataaagactaaaaaatcaatgttttaaaagtaaaaaatattccttaaaaaatgtcaaaagcaaacatacttctcggcaaaatacatattaatgtgttagttacatcattacacgagttgatacacacaacgtctagtatccatcgtttatgactaagattattgggatatctaatcttattcactcccttagcttttgtcctgagtgtcatccaacaaagtgttttcgttgttgatgttctttcttatctctacgcatttcatctctctatcgaaaatttcctctatccctaaagtagtgcagcttggtagtttccaccgtctatccaggattgagctctgagatttgacggcaaacttaaaaagtcacattgaccctagtgacaatcattgcaggccgttaactctctcttattgaggctgaaggcagaaggacaatggcattaatgatcacaatcagattgggcttccttgcactccaagtgggcttgttccttcccaaaattttggatcgcatgggccaccaccttgggccgtcatgctacgacgacaacgtatggccctacatccacacccacacttgacactaacttggcatgaccaatcaacagtagtttatgtcaggtgttacatggcagagcaagtaatggtagggtcacgacacaacattcatgtttttctcatcgtaacacatcaacgatcactatcacttttgtaataaaatgagacggtgacgttttccaactctattatggtttcaaacccttaatttatggaattacaagttcggcgatgcaatgtcacattcaatgcgcgctccagtaaggctcgatcaaaacattaatcttacacgttttcttttttactacattaatcttgcatgttggttagtgttttcagccccagaaaagtttaatttatatatactgtattattttttttattcataaaaataaaaaataactacacaataatttataataattcatagatcatattaaaaccaattcaactgagattcgattgatatttatctatgggtactatgaacatttgaaagacatgtaataaaactttatccaattgcaacattttaacaatataatgaataaaacgatgagataaaatgaccaattctattaagtgtttaattgaaaagaatcgcagtgattgtatatggaaattaaattaataaaaaagttattaaaaattacaataaaaatatatattaaaaaacattgattattatttttaataaaaaatttacttacaattttttactagttctaggaacacatttgacaataatcttctcaattaaaggcaatcactttaatataaaaaagtgagataaataataaaaattaataacatttaacaaaatgaaacacaaaaaataaaaagatctgaaataacttatacttttttatgtgaaggataatgtaaaaatattgtcaatagtaaactccctaatacacatttgattttgaaaaaaaaatataaaaattataaaaattgtttggatcttacttttgattttaataaatctcattcacaattttacaattttaaataaaatttaaccaataaaaaaatatgttaaaagatatgtttaatattctttctaacgtgaaaaaactcactctatataccagtataaaagtaaccgtcaaatgttgtcaaacatagttttgatgacaacggcttttaaaagtcattcattgactgagcatatatttcttaggtttgcattaagtgtgagattcaactgaaactgatatatttatgatggtctttttgaaccagtcaacatgaatgtatcatatttttccaaagaaccaacaagttagtttatttagcattcatagttccccaaacgtagaatcggcctaaagtaaaaattagaagttttttttttattttgaagaaaaagatatacgaaaccttttaattatttttgtttttaataaactaataattaatattgatagaattaaaattcaacttttaattattttacatttgggtcagtcctgttccaaaggaattcagcgataaacagccacatattccatcatgtgagtagcatgaatttttttcaaagagattgttttggtgatgggggaagcatgctgaacagttggccatcttgaatgtgcacaaatggatgaggtcagttgctgaaattgtgccttagttattgcatcacagccccatgagaaaaggatgttcccaacagtttcccattttcccaatcccctactcctacttctattttttccatcatcaatcatcattcccaccaaacagtttcacaaaaaaaaaaaaaaaataataataataataataataataacaacacttttctatagtgaaaagtcaaaccaccctaacttgaattgaaacaatgaacaggagtaacacattaaaatattacaaccttaaaataaggactatacattatacactatactactacaccaattcttgtcctttcgtagcttcttacacttatcgccctattcagtccttctgtctcctaacattgttttaattagtaccttcctattcttagccatatattctaagtattgaatgtctcggacacatttattatccaaatgatccgtttcaatcttcatttggctggtggacaaatataaccaaaagggattcttaattattatttattagtattagtgttagtccagagagcagcaaaaaataattaagagaagagaagggtcatgtagactttatataatcaaatttaaattttattattatttttttattgaagggggggtccccatgtgataaaagaaaggaaatcacaacagagattcataggttgtgaagtgtgattctcaacatcaggaagtgacgcacgggatcatcacagtcaccaaactgaagcagactatcctttctgtttacctcgaatggctttctcggcaatgttggaccacacctatattgaggagcttccggggaaaaaagtttgcagctttttgtttcgttttgtttcggttctaactttgatcatgtggctcctactccaaggaagtcaataaatggaggtggaattgttgttgcatctggggggcactgatcactgctcaagttttgatgatctctgtgttcttctgctgccactgatgatgatagcgaggcttcactgtggcctaatataatctgtgatgtggaatttgagaaaccgtaaaagttgttgtgattgttttgttgttggtggtgcttcattagcatcacatattgggggtattgagggtagaaaccagatgaaggtggttgttggtgatgatggttctggccaaaacactctcccaccatgtcattgctgcttctaacacctacaaatccaaatagcatagttgtgttaaactatagaaagaaagaaaaatgtgacttttatgagtatatgcaagttttccaaaaagggtcgcatcagtcactgttgcagaccaaagagataaatggagaaaaaaacatggaaaagtaagattttttttaatttaactttgtttgaaaagttggaaatagtgatcagttgaagggtagtgagtaatgaaatgaggcttgttgtaacaaggaacctgaaagttgagaaaaaaacaagtgaatggacattggacattggacatttgacacacctgaaaagaaatcaagtgatgtttgttgaggatacaaggcaacatgaggaggggccagcttggtggttgagaatgcttctttggcagtagtcatatggggtgaggaatttgagccaaattcaatcccaccagaagaagccactactccatggaagggtgcagcagcatatggaaaactagacatcatgttaatgttgttgttggcaaatcctccattatttgagagattgaaacaatagggtggtggtggtggtgcttgttgttctgtgtctcttgagacaacaatgctgcttgttgttgtgttaatttcatccactcttctgtaaacagaagaagattggctcatccttcttctcctgcaggcactggactgttctctgtactttcttgccattataacatgccagtgattcttcactgcattatctgttctccctgggaaaagccttgcaatcatggcccatttgttgccataaatcctatgtgcctgcatcagcctttcttcttcttcttcactgaatgccctcctattgatccttggatccaactggttgaaccacctcagcctacaactctttcctaaaatcgcaaaatataataacatctcatcaaaacaaagattaaaaaacaaaaaatttcatgacattataaataaaataaaaaggtaaaacaaaagttcttttaaaaaaaacaaaagaataagaatatatatgatagtactatgattttgcactagtttttacttttcacacctgatcttccttctaacttctcagcaatgaggttccagttctgagggccataaagagcaacaagctccttgagtttggaatcttctgctggtctccaatgccctctagcacaaagcttggaatgccccgaaccgccactattagaattattctcattagggttgttgtcatcgttagagttattagcatggtggttaactttgtcactgtcttcaccagtactgctatcagagcctttaccctcttcctcttcagcaacatcatcactgttgttggggcattccctcgtgaagggaaaaccccagtttgtgcccccgttggagacatagcaatcttggtgatgagaagaaaccacagtaccgtagttggaacaaagagagagagagtccatgtcggcatagaccattcccattgaaggagaagaagaagagtaggaggaagaagaagggcatctagtgaggctgtttgtgttctcttgtgaagaagggtatatcaccctagctggccatgccttcatctttttgtctcacaaaagatgaggaagaagtagaacaagaagaagaaaaagggtaagtgaaaatatgaaagtgttgcaaagtggcaaaagctaagaagaagaagaatattttatgtgatgatgatgaagaggaggagtaacattgagagcaaagtttgacaggacagatagttgaaggggaagaagaaacagaagacagatttgtttgcaggaagggttaaaaacagctaaagtgctttggttacaaaagtattcaagtgttgaagcctttttaacagatacctacactaatgaaaccattggttcaatgagaaaagaaaagagagagagagagagagaggaaattgtgtgtgtgagagaaagagagagaagtttaaagtagttaggtacccagactggggcaatgaccctggcattcttcatttaaccagttgctgtcattatattactactatttattctattcttttaacaaaatcacacctcactcacacgtgtgagagtgagagacaggaagaaaataactttttatatattttctctctctctcattctctctccatccatgggggggttgcagggtcttaggctgtctctctctaaattgacaagaaagacactaatgtgatgggtgcttccttcggcttgtggcagcagcaaggtacacctttcttttcaaagcacatcaaagtttttttttttcttaaatattttgaaatttcatgataaattacgaaattttatttaaagtcttaataaacaaaaaatattattttgaattttttattaaaaattttatcttaaattattggtatgtaatatgagttaagtaatcacgtattactttataaattaatcttttaaatattatcaatatattatgattatatcacattattatataattaataataaagatttaaaacaaaaaattaatatattaaaaatttaaaataataaaaaatattagagatttaaaataaaattttaattatttataaaaactttaataatatttaaattttattttttaattagcggggctttgttgctattgctgcacaacacaacggaacaagccttgtcatgctcaaatgcactagtaaatatgaccctagctagcatatagcatcgcctattcctcaaaaacctttttcctctctctctctctctctttcaatttcaatgtctctgtccccatcaacatcagtgtcacactactgcattagtccctcggcttgtgcttgtgtttttgcttggtcgtgttgtgttattaactagattattatgtgcaattcaaagagggttcagtaaccttggtttcagttgaggtaaccacttgaaatcgacctaacgacctaccaaatccaatcccttcggtaaagaattactctattactctataccatacacgtacctcaactaattcatcttacatttcttcctttatattaattttattcatgatatgtgattattgttggtttaagagaattatacaaatagtaaaaattgaatatgaattttcatgttaaataaattattctcatttttgtgaatgtaatgaagtttgctttatattattacgcaacctttatttataagacttaattatctaattcaccaaaattaagaaaaaataataaatgtaatttttattaataaatttatactaaatttatatttttcaaaaataccatttttattaatgtttctttctcttctaaatgtatgttaacataatatctttttatttaattaaaaatatttttagttaaaaaataactagtatatcatagaatatgaatttggttgtatataaaagtaaccaacaaatttaaaaaaataaaaaaaaaactgtctgatnnnnnnnnnnacaaagcaagtatcccacggaagagatctctgtacattctaaatttccatcctaacagaatcgcatgtagccaacccaacaaggaaattaaaaagaagacgaaaaaagaaaagaaatgcatgggtacattttcttttttcttaaatacagttttgatatgcaaattatttttttttcagttataattttataaatttttttttgttttagtcattataaagtgtgtttatttatttttcatccttaatatgttttaaataatactttgaaaatatataaaaaaattattttaaataataataaaatactatctaaaacattttaaagacaaaaaacaaaataaacatattttataaaaattaaaataatttttttgcaggcacaaaaatgaaaaaagtattaaattacaggaaaaaaatgcatttaagctttttttaaaggaaatgcatgggtacatataattttatttttaggcatatttaacccttattaggttttatgaaattgcacattattttttattttttgaacaaataaaccactgttttaattcttgaaaatatatagtattgttaaattaattcttaaaattaagaaaaatagaatcagtttttgaaagtgtaattcgttaatcatattagtcaaaaatagaaaaaaaatactnnnnnnnnnngccttaccaataaaaattattttgcaaatacagattaaaaaaatatttttcttaataggttatgttcgttttaatctcggaatttcttcctctaaattgagtaaaggtaaaagaagtaatttcagttattaacgagtaaactaatgaattaatatttttatatatttatgatttattatacatttatttgtatgctgaaagggtaaataccatttcaaataaataactagccgaacaatcgtatgtagagttggaaaaaaaattcaaatatataaaactaattcactttaaatctatttaaatagtctagttttatattcaaatccaattttttggattttaaatccgatccaattaatcgaatatggattggatatttatttggatttttaaatccaatacaactttttggacaatgatcgttaggttttttttgccaacttcgataactgctattttttggtcgatatcgttttcagttattttggttgatgtcaattgatgatgtttttaagtcatcatcgattgagactattttttggttaatgtcagtaaggatttttttcagtcaacgttggtcgggactattttttggctgatgttgtccaaagtttttttggccgacattagtcgatgctattttttggtcgacgtcagtaggtttttcagtcgacatcatctaggatttttttttgccaacgtcaaatgagactatattttttgctgacatcggatgaaaaacatcaccgaccgacattggccaaaaaaaaacctaactaacatcggccaaaatattttctcaattgacgtcgatcggaaacacccttgttgatgtaaacaaaaaatattcctagccaatgccgaccaaaagaaatagtcgtggctaatgttggccaacaaaccctagctaacgccaacaaaaaaatagtttcaaccagtgttagcaaaaatacctaacaaacatcgaccaaaaaatagtctcgactgatgttggccaaaaactatcaacgaccaacatcggcaaaaaaaaaatcttaccgatattcgccacaaaaatcctaaccaacgtcggccaaacactagtcacgatcgatattgatcgaaaaacccctagtcaatgtcggccaaaaaatattaccaaccgacattgactaaaaaccctagttgacctcaaccaaaaaataatcctacctaagatcaacctaaaacatctttgactgatgtcgaccaaaaatgcattgatcgatgtcagccaaaaaatagtcctgattgatgttggtctaaaagtatgtgggacgatgtcaactgaaatttccctggatgaggtaggccaaaaataccctaaccaagatcgatcgaaaatagttttgaccaaaatcagttgaaaatagctcttaaatggataggtgctatgttttcattttttagcatttaattactaaaatttgtataaaaaaaatccttataacatttaagtggatataatttggatatgacccaatccatatccacttaaatggattggatcttgaatctaaattattttttaaaaaatatcgatatgaatttaagatttaatccatttaagtagatatggattggatttttaaaaattcaatcgatgctcacccctactcgtatgcataagcaataacagagcttcacaaaatacctattaaggttttgggatattcagtgggctgaagagtcaaataccatgttgaacaaacaaattaagacctcacaatatatatactggtcatagtcatactccacaaaatatatgtaggggttctccaatattcaactagtctaatagtcgaacaccctctaaacaaaccagatacatggaatacatggctagagtcatgagtatctgattaactaaatagttgaatactccctttggaagaatcggaggtgtgtgggcttcaagcaccaaagtcctaggaatacttggtattcgacctaccaagtggccgaatacacgacaaccaacaataaactataagaatatcataataaaaaatatataaataattaagcaccataataatgattattaagactagattatcttctttcaaaaacaaattaagactagattatctaaaatgataatcatacataaaagcccataaatccaagactcattatggtatatataaataagagtgactttctcatcaacttagaaatgattaatgagaacctattcatgtcataaggaatgaccttctattgttcacctctttttttgtaacaaccttactttatgtaatagttatgcatgtataactccccattaacaagtgctttcttttacctattcatgtcataaggaatggccttctattgttcacctcttttttggtaacaaccttactttatgtaatagttatgcatgtataactcccccattaacaagtgctttcttttactaacgttttttccttatcttttgctcaaatttcattttttatcattttatattaaaaaatgttagcaacatattctttttcttattattattctctaatacaacttttcaaacataatatttgttaatttattactgattaaaattataaaaaaaaatataaaatttagtgggtctcactctttttgaacacctataattttgtaattttgaattaataataaataatatatgcaaaagagaattctagagaatttgttactataatcctcgctaattagcaaaattctcttattttttttactgttaagtctctttttcagttattagatcannnnnnnnnnnnnnnnnnnnnnnnnnnnnnnnnnnnnnnnnnnnnnnnnnnnnnnnnnnnnnnnnnnnnnnnnnnnnnnnnnnnnnnnnnnnnnnnnnnnnnnnnnnnnnnnnnnnnnnnnnnnnnnnnnnnnnnnnnnnnnnnnnnnnnnnnnnnnnnnnnnnnnnnnnnnnnnnnnnnnnnnnnnnnnnnnnnnnnnnnnnnnnnnnnnnnnnnnnnnnnnnnnnnnnnnnnnnnnnnnnnnnnnnnnnnnnnnnnnnnnnnnnnnnnnnnnnnnnnnnnnnnnnnnnnnnnnnnnnnnnnnnnnnnnnnnnnnnnnnnnnnnnnnnnnnnnnnnnnnnnnnnnnnnnnnnnnnnnnnntttatcttcttttccttatgttgtgttgggttgaggggggaagaaaagaaatataaaagaaatagtatggatctcttataggtctcacatctcttatacttaactttaattcaaatatatttttcatatttctatcttctctatttcatcatatcaaccaaacagtattaatcgattttactaacttagagtttgaattgtatctttgaaaccaaacctttttaacatattttttaaaaagactttgttcttaacacttttcatatttatgnnnnnnnnnnnnnnnnnnnnnnnnnnnnnnnnnnnnnnnnnnnnnnnnnnnnnnnnnnnnnnnnnnnnnnnnnnnnnnnnnnnnnnnnnnnnnnnnnnnnnnnnnnnnnnnnnnnnnnnnnnnnnnnnnnnnnnnnnnnnnnnnnnnnnnnnnnnnnnnnnnnnnnnnnnnnnnnnnnnnnnnnnnnnnnnnnnnnnnagtttagggtggatttgtaatgtttccttaaatttttaaataaaatattttgctcgataggtattaattatattagtacttactagggtaattttttctttgagtatttttaaattttaaataaaaataatttaaaactactgcttaatttagtttaacacatttacaaatgttggatagaaggaacttattttatttttgaaaatattttaaactttttcttaatgggccttaccaataaaaattattttgcaaatacagatgaaaaaaatatttttcttaataggtgatgttcgttttaatctcggaatttcttcctctaaattgagtaaaggtaaaacaagtaatttcagttattaacgagtaaactaatgaattaatatttttatatatttatgatttattatacatttatttgtatactgaaatggtaaataccatttcaaatgaataactagccgaatactcgtatgtagagttggaaaaaaaaattcaaatatataaaactaatttatatataattcaatctaattcattttaaatctatttaaatagtctagttttatattcaaatccaattttttagatttaaaatccgatccaattaatcggatatggattggatatttatttggatttttaaatccaatacaattttttagataatgatggttaggttttttggccaacttcgataagagctattttttggtcgatgccatttacagttattttgactgacgtcaactgatgatgtttttaagtcgtcatcgattgagactatttttcggttaatgtcggcaagggttttttcagtcaatgttggtcgggactattttttggctattgttgtccaaagtttttttggccgacatcagtcgatgctatatttttgtcgacatcagctaagtttttgccaatgtctgtcaagattattttttttgtcaacgtcaggtaggtttttcggtcgacatcatctaggattttttttatgctgacatcagatgagactatttttttgctgacatcgaacgaaaaacatcaccgaccgacattggccaaaataaacctaactaacatcggccaaaatattttcccaattgacatcgatcggaaacacccttgttgatgtaaacaaaaaatattcctagcaaatgccgaccaaaagaaatagtcatggctaatgttggccaacaaaccctagctaacgccaacaaaaaaagtttcaaccagtgtcagcaaaaatacttagcaaatgttgaccaaaaaatagtctcgactaatgttggccaaaaactatcaacgaccgacatcggcaaaaaacaacttaccaatatttgccacaaaaatcctaaccaacgtcagccaaacactagtcacaatcgatattgatagaaaaatccctagtcaatgtcggccaaaaaatattatcaaccgacattgactaaaaaccctagctgacctcaaccaaaaaataattctacctaagatcaacctaaaacatctttgactgatgtcgaccgaaaatacattgattgatgtcagccaaaaaatagtcttgattgatgttggtctaaaagtatgtgggatgatgtcaaccgaaattgccctggatgaggtaggccaaaaataccctaaccaagatcgatcgaaaataatcttgaccaaaattagttgaaactagctcttaaattaataggtgctaagttttcactttttagcgtttaattattaaaatttgtataaaaaaatccttataacatttcagtggatataatttggatatgactaaatccatatccacttaaatggattggatcttgaatccaaattatttttaaaaaaaatatggatattgatttaagatttaatctatttaagtaaatatggattggatttttaaaatttcaatcgatgcttacccctacttgtatgcataaataataacagagcttcacaaaatacctactaaggttttgggatattcagtgggctgaagagtcaaataccatgttgaacaaacaaattaagacctcacaatatatatactggtcatagtcatactccacaaaatagatgtaggggttctccaatgttcgactagtctaatagtcgaacaccctctaaacaaactagatacatggaatacatggctagagtcgtgagtatttgattgactaaatagttgaatactccctttggaagaatcgaagatgcatgggcttcaagcaccaaagtcctaggaatacttggtattcggcctaccaagtggccgaatacacgacaaccaacaataaactataagaatatcataatcaaaaatatataaataattaagcaccataataataattattaagactagattatcttctttcaaaaacaaattaagactagattatctaaatgataatcatacataaaagcccataaatccaagacacattatggtatatattaataaaagtgactttctcataaacttataaatgatcaatgggaacctattcatatcataaggaatggccttttattgttgacctcttttttggaaacaatcttactttatgtaatagttatgcatgtataactcccccattaacaagtgctttcttttactaaggtttttttcttattttttgctcaaatttcatttttttttatcattttatattaaaaacattagcaacatactcttttttattattattctctaacacaacttttcaaacataatatttgttaatttattactgattaaattataaaaaaaacataaaatttagtgggtctcactctttttgaacacctataatttgtaattttgaattaataataaataatatatgcaaaagagaattctagagaatttgttactataatcctcactaattaacaaaattctcttatttttttactcttaagtctctttttcagttactacatcaaccttatatctcatgttctaatatgtttattgaatattgattttcaatcaagtcaaaatcatccagaggctctagttaatttcagttcaaaaccaggcaagtgtgtaataaaaacataattataacaaaataaagtaaaaaaaaggaaaagaatgttgcttatatagggaaatctcctaaggtggcaatcaaaacaagaaaaaacgaactacagggatgctccaatgtaatttgcaaatataaatctaaaattatttgataactcgtttatttaatcaaaattaataatatgacaaatttttaaagtatgtagaaatataaatatttgattgtttttttattattcaaatatgataaaagctaatatactcaagataatnnnnnnnnnnnnnnnnnnnnnnnnnnnnnnnnnnnnnnnnnnnnnnnnnnnnnnnnnnnnnnnnnnnnnnnnnnnnnnnnnnnnnnnnnnnnnnnnnnnnnnnnnnnnnnnnnnnnnnnnnnnnnnnnnnnnnnnnnnnnnnnnnnnnnnnnnnnnnnnnnnnnnnnnnnnnnnnnnnnnnnnnnnnnnnnnnnnnnnnnnnnnnnnnnnnnnnnnnnnnnnnnnnnntaaatattaatatataattatttgtatcgaaattaaataacaataaaaaatcaaataattcatatatatatatatattactcaaataactttgtgtacctaaattttatttatttatctatttctgaaatagatacatgtcgtaaggaaatacccattaattaattaataacatgattaatagaatatcatgtcgtcaaatcaatatcatttaaaaattattgattcagtagtaaagtcatttcttaaaaacaaaataaaagttaggttttaaaaccaaaaccactggtaaatgctataccaaaatacacattaaaattaaagcattatatgcaatgtattctttaataaattataaaataataaatattcttcttttaatattatatattttatttaccttcacatactctaatatataatattatttttcaattttttaatttttataatattataattacaaagtataaataaaaccgttcaacacacgaacattatctctatataaattatatcatttctataattattattgcatctccaataaagtcagctgccaagtctacatataattaatggttctgatcatcattcaacaaagcaagtatcccacggaagagatctctgtacattctaaatttccatcctaacagaatcggatgtagccaatccaacaaggaaattaaaaagaagacgaaaaaaagaaaagaaatgcatgggtacattttnnnnnnnnnnattttataaagtaacaaataatttgactcttttattaagtttggaaataaaatttagtaccggaaacaagtaccaaaaaagtaataaaaggtcagaaatttgaactgcatatgattttcttaattttttgtttggttttttacaagtatctccattataagtcaatcatatttgaaatattataggacactaatgtagaaattatcccagcaaagattcaattattttcttaattggataatcgttagtttgtttatagaaattaaaatatataaaaaaaaacaagggaaacaatttcttcttattttatttttattacttccttatttactatataattttcaatgtcacaattattcacaaatccactttattttaattagttgtttatgatttgggtacttgcttaatattgatcgccaactatcgtgatctcttggattgctttgtccgtatccttttccttgtaaagtacgtagcttgcttattaataattatatatgccttttgtctttcaaaatgatatttaatttcttggagtttataaatatttcttctttttaatttttcttcgtaggttttcaaacattcttaattaatcaaaggatgtgacttccggattctatatatgattgttaaatagtgacgacaacatattttaaattatgaaaacaaatatttatttctgttacaaaaattctttaatttgcaaccaccaatacccttattaaataattatctatagacttgatagttatatatagattcaatttcttattaaagttgggatctgtctcttttattaaagttgggatctttcttaaagttgaaatgcaagatgcgccttaaaaaagaaaatatgaagtgataattattgattgggaaatcaatatattgtcacaaaatatatacatatataataaattatggaattcttgactaattaatgaatttcacttctcatactattactcttatttcacactttaatagaatcaaattctttagagatgtacatcattttctttgtcaatttcgagcttttgaaaatatttaagaaaatcctctgaagctggtttcgcctttgctcctcaaacaaacttctcaggcatattgtcactaaaggctgcataaataatgtaatttaattgacaaaatgtgcaatttctttaaaaatgattcctttgaatttaaattagtttcacaagaaatttcagttaatttatactttatttaactagttacaagtttatttgactaaaatagacattattaaatgagtttatttaactaattgataacattttccttatgtgttattcaagtaaggtttaaggttaaagtttatagtctattattattattattattattattattattattattattattattattattattattattattattaaagttacattaattgacttaaaaattggaaaaccgagtgccaacatgctacaatgtaatatgtaatatggatgcctctatcttctcatattcaaagcagtttggaatgggagaaattcttcgaaattatgaaggtgaatttattgaggtacaaccaagggtgattaaaatttagtttgattcgatttttacattaaaaaatgatctgaatcaaatataaattaaaaatataatttggtttgtttcagtttaaatataacatcaaatttgaactaaatcaatcttttacgattttattctgtacaagtcggtgttttttttaaattttttaatttattatcataatttaaaatttatcaattaaacttacataattatttgttttttattaaattttctaacataatttagttgaaaattattattttcacttctagctaacattaatataaaatgatattaccaactcctttgtaatataatagtaaattgtgtatcatttgatatttaacaccactttttaacaatattagtacatcattttttaacacgtgaaagtaaaatatgcttcttgattataaattaaaggaaaaataataaattatttaatacttactattaattgtaacaataaaaattaatataattataatatgtgatttgttcaatttggttcaatttttataacaaatttgaaaatcaaaccaaaccataaaaatatgcaatttttagatttttagtttttttggatcaacttgataatttacaaatgatttgatttgattttgaacacccctaactatatccttagtctgtggagttccatccatagcagagggagaagcttcaagtatccttgctgctatatcttgggtcattgagaaaggctacatcaacgttgtctttgagatggaatgtaagcaagtgcatgatgatctagactccaacagtccaaacagctcagagtcaatcttaactgcttgtaatacagctcagaaacattacaaattcatctgtgaacttaatccattgacaagttattcatgctctatcaatatatggcatctagattctatgctagttcacaccattttaatcattctcgcgattgtatcaatgctttgtttataagtgaaatgatatgagttcttttctaaagtccctttattttaaaattaagtaaatttggtcccacaattaattttcttttccataagacatttaaatcctcattttctactcaaaattttaatgaattgaatcagttaacttcttttaaaccatattatgcgcaaaacttactaatcaaaacatcaaacttaaaaaaaaaactaaattttgtcatctctttaaaacctaatttcatagcctatatataaaatcctttaactttgataaaattttcactaaatatttttttagaatttttcttcttcaaaatgtcagtctttttattgatatattaaaacagtgttttaatgatatcatgatttgttataaatatatatcttataattaattgatattatacatctatgctgagattatttaaatgatttagcttataattgaatgaatgcatgacaattnnnnnnnnnnnnnnnnnnnnnnnnnnnnnnnnnnnnnnnnnnnnnnnnnnnnnnnnnnnnnnnnnnnnnnnnnnnnnnnnnnnnnnnnnnnnnnnnnnnnnnnnnnnnnnnnnnnnnnnnnnnnnnnnnnnnnnnnnnnnnnnnnnnnnnnnnnnnnnnnnnnnnnnnnnnnnnnnnnnnnnnnnnnnnnnnnnnnnnnnnnnnnnnnnnnnnnnnnnnnnnnnnnnnnnnnnnnnnnnnnnnnnnnnnnnnnnnnnnnnnnnnnnnnnnnnnnnnnnnnnnnnnnnnnnnnnnnnnnnnnnnnnnnnnnnnnnnnnnnnnnnnnnnnnnnnnnnnnnnnnnnnnnnnnnnnnnnnnnnnnnnnnnnnnnnnnnnnnnnnnnnnnnnnnnnnnnnnnnnnnnnnnnnnnnnnnnnnnnnnnnnnnnnnnnnnnnnnnnnnnnnnnnnnnnnnnnnnnnnnnnnnnnnnnnnnnnnnnnnnnnnnnnnnnnnnnnnnnnnnnnnnnnnnnnnnnnnnnnnnnnnnnnnnnnnnnnnnnnnnnnnnnnnnnnnnnnnnnnnnnnnnnnnnnnnnnnnnnnnnnnnnaacatggtgtgtcatataaaaaaaaaaaagtaacaccgtgtaaatagattaatattaaaaattaaagtaaaattcaaataattatttataaaaattgatgtagatgaatataggtatggataatttgatatccactctataaataagaatatacttttgctcttcaaagtctaaagagtgtaatttttgatggtttataaccaccattaaatattaattataattactttgaaagactaaaaataaaatatttaaaattagaggggaaaaatgaggcaaaataattataaaggactcttatggagctaatatccaatttaatccttaagtcagtatatgcttattttaaacaatactaacttgggaataattattatgaaggttatgtcgacttctctattaatcgtgcgctaaaagtaaccgtcctaagagtatcagacttaactgctaaaattgacaagtgcacttaatccaaaatcacacacacgagagaaacaaatattttacttttcagtccaaaatatcttaaggaatactgttaaaactaattattttaattaatatcaattaggatcgattagtccaaaatttattcactactacagacgggggaaacgacgacggttctacaacccaaacgacgacggttctcgaaccgtctttgttgcggtggcactttcgacgacggttctaaaaaccgtctttgtaaatttttttttttttttttttaaatagatacaaagacggttctcgcaaaaaccgtctttgtttgtgcactttcaaagacggtttttcagtaaccgtctttgtttcccttcattttaatttttttttttattttaaaataaatgaaaagaagacggttttcccaaaaccgtctttgtaggccaccattcaaagacggtttttacgaaaactgtctttgtttcccttcattttaaattttttttattttaaaataaatgaaaagaagacgatttttcaaaaaccgtctttgtaggccaccattcaaagacggtttatacgaaaaccgtctttgtttcccttcattttaaattttttttattttaaaataaatgaaaagaagacggttttcccaaaaccgtctttgtaggccaccattcaaagacggtttttacgaaaaccgtctttgtttcccttcattttaaattttttttaatttaaattaaatgaaaagaagacggtttttcgaaaaccgtctttgtaggtcaccattcaaagacggtttttacgaaaaccgtctttgtttccctgcattttaattttttttaatttaaaagaaaggataagaagacggttttcgtaaaaccgtctttgtaggccaccattcaaagatggttttcgtaaaaccgtctttgtaggccaccattcaaagacggttttcacgaaaaccgtctttgtttctctattttgtttttttttttttttggaatgtctacagaatctacagaacgaaaatcgtctttgtttctatttttttttttttttggaatgtctacagaaattgaaatttatttgtattattactaccaaataaatttaagaaatacaccanattttattttttttggaatgtctacagaaattgaaatttatttgtattattactaccaaataaatttaagaaatacaccatgttgtcataatttcattctataataaataaataaataaaaaacaaattaaacagtctggaaacaccaatcaactcatgcatatacaactcattcaacctaaacaaagactaatgcaatcatataagaaaaatgaaatgatatattgcaaaaatgaatttacaaaaagtaaaaattgtttaattataagtgaaaaattatcaaattacaaagtaatatagaagtatgcctttactttttttccacccatccaagtccttcaaaagcaaattatagacgaatatatttctctccaattgatttcactatctggcaagccgactcctacagccatgcaaaaaataagcatcacctcaacaggtgtagcagtaaaataaaaacaatttaagtgataaagcagtaaaaaaaatctaatagcattttacttggttcaattatactttgaattgtagcagtgatgataggttcataacttaatagaaattggttaccttttgacattgcaatgtgatgcaatatgtaacaactagcaatatatatatatatatatatatatatatatatatatgcttatgctatcagagaaaaaagagtcttccagttgtttacttagctttccttaaaatcccaacctaagagaaggatgcaattgaaaaatagaaccattcaattatgaattataattatataaaaacaaataaatatcctgcacaaagcgcgagctaaaacactaatttcaaaaacaaatgaaacctttaattagatggggaaaaaagaaattatatgtaataaataagagcaatctagaatttaatgattcttatgaaggaattcatccctttaaacaccatacattaaaatctaattacttattacaactccaaaatataatttcaaatatttaaaatatttacttattatgaaatttataataatataatttataaatttaattatttatttattatgaattataattgtaacgccccaactacaattagggtcattaccctgccttaatcactaacataaacattaatcatcagagttaagcagttcggaagcataagaataaaaggacatcatcaaatgtcacaatcatcaaatttatatacatcaaaatatggtgaatatacttaaacatctgtgtcttatacaaaactgtacacaatatcccctcagggtacacaaaaatcaaacccaaaggctatacaaaacatctgagccacacgctcatatcatctaagcctaaggttttcgatcagcaactatccctgcataggcttcttgccttgggatctctctgctcctgccgatgactcacctgtaaaacacaagccccacacacggggtgagatataaaatctcagtaaactcagggcccttgaaggtattaccttcccctggttcactttcaggcacatacatagaaataatatgttctcatcaaacacagagtcaatctcagtcctcaacaaatcacacagggcctcaacccctcacacataccacttctatggtatcaccccatcctgtctacaaacaggtggtacacagcacatcatccggcagaggctacatctaggtatataggaacatctccacccacggaggctacatctatatactaggaacatctctagcccggaccataacacgtctattggaggcttcatctgaaacataggaacatctcacttaagaggctacatctatgtaacaggcacatctccgtctagtgaggctacatctgtgtataggaacatctccattcgggaggctacatctataccacaggaacatctcacatcctacatcaatcaattgcctgaggaggctacatctgtagatataggaacatctccattcgggaggctacatctatatcacaggaacatctcacatcaggtcttactcaatctctcgtcatctatcctactaccataggattcccaattcaatcatagaattcacaattccaattcataatcaatcaagcataacatgatgcaacaatgcataaccatccatagccaattcccaatcattgggtccaagcatatctcaacaatctcaaatcaatatcatttccataccaattccaatcacgggttacagatcacaatttatcatgcatcaatcaagcatgtcaacatacaatttctatatacatgcaaatgcccataacagaaccatcacccaaacatggtgcatggtagaacacagcaagggcgtacaatcaaggatcaagagcttacctgctctgagcaaagcaccggccctcccggcttcactatcaacaccactgagactttcaatctcacgtcctacatgtcattaaacatataatgcttcaataacgtgcttaagccgtgaagacaacaagaagcatataccacagtgtgtaacacacactcaactacttcacacgtgattctcagaccctcacaggtccagcttggccctgccaaagctcacagagctcgaagctcaccacaatagcccaattccaccgaattcacaccgggcttgaacggttcacaccacacacaatggcaccgtttttcatggcttccaaggcacaacaaaacacatactatggctctagcatgtcaattaaactaaccaattcagcatataccacaatacatgccttacatagagccaacaatccaaagttcaccaaactaacaaatgagagctaatccttcatccccaacacattctaaacacatctctctaaaggacccaaggctaattcaagctctatcaaaagtgggtcactattcacccaaaaccccaatcaacaaattaatcggtgaaacttgagtttcttacctcaatgacgacaaggaatgcccaatagcaacttcccctagcttgggtactcacgatttgtcgccgttcctcgccgaactcaagtttcaagaacttcccttgagaaagggattctcaaatttgggggtttttcaagagaaaaggatgaaggatttaggctcactaggtgttttccatcaagattgatgtttaaggggcttgatttgatgaactatggagtaaaagcaagcttggaagctccaacaatggagtttgggcgttcagaggaaggagaagaagcttttctcttcaattttcgcgtttgaacaagttatataaaactgatccacgagtctcgcgcgggtcgcgccactctccgcgctactcgcgccacatgctcggtccttccacgcgacccgcgtggatcgccacgctactcgcgtgaagctccagaggagaacatggttttctagggcactacccacgcgacccgcgtggatcaccacgctactcgcgcgaagctccagaggagaacatggttttctagggcactacccacgcgacccgcgtggatcaccacgctactcgcgtgacatggcagacccaaagtgcctatcttgtgcatatggcgcgactcgcgccaaactccgcgcggttcgcgccgtagtccagaaccagttttctcctctcctcctcaagccttcctctctaaatacaccaagcctcatcatttatctttaagtatggctcaacctaggcttagtcacgtactttgaaattcaaggtattacaataattatataaaaggaaatatatattcttgcacaaagcgcaagctaaaatattaatttcaaaaacaattgaaacctttaattacataggggaaggacaatgagttactcttaaaatattaccaccagtaacgatgtttgacaccataaagtatatattgaaaaactcctcctatatcaatacgacgggccatggtaaaaaattatgtctcttaaacacatattaaagtattttatttttaaacttatgtatatgaaataatatttattgagacttgagagatattttttaagttaatcttttcaatggcaatgttatattttatttttttatttgaaatgaccaaataaaacaaagacggtttttagaaaaccgtctttgtatggggcagaaacgacgacggtcttcagaagaccgtcttctttgttcaccttcgacgacgggtattagaaaaccgtccttgtaaagttgcttttaattgcaaaaatgccaccgcctcacatacaaagacggttctgaaagaaccgtcgtagcttgtgcgtcgttgtagcgcctaattgtagtagtgattttatccccttcttttgctattataaagtaattaattgagatattgaaattttagagtgtatttgaatagagaattttaattgagaaaaataatttatcataaaatttaaaatttattatttaaatatttttatacgaagaaattaaatttttaaaattttaaagtaaaattttaaacaactaaaaatataaattttaaaccactatttgctcctctccatcgatgactagtattttgattttcattactctcacaatactcacctcactcacatcttaatgctcattcaaaattttaaaaataaaaaatttaatttttttatccaaatacaatttttaaaatgaaaagaataatttttttatctaaatacatttaaaaaaaatgaaacaattttaattaaaatatttaaaattcttataaccttatccaaactagtaaaaaaaatggagattagataataatagtaaaaggtgacaatgttgatgtttgtttggggcagttggggagacaagtggttacccttgtggtgatgtaaagggataaaaagggggctacctggtttccaactggtgagaccaactgaaaagagatttgaacaatcatcaaatacgtgcgcgtaggatctggtggattgacgggttaagttgttcaggagacagcaccaagcgtgatatatgatatgctatatattttttttattagcatcagttaaatacgatattaagagtttttaatattcatataaatatatatatatatatatatatatttcaattatgatatgcttattattaaaataaaattctaattctaaataaataaaaatgatacaaaattaatacttgaacattactgtccttttgaagtcctgtagaaaatgaaaacactgcttggctggctccattttttttcctttgtttctccactcccacagtttccttgtgtaccctgtttgcacatgcagtgctatgccctggtctgcatttcatggccctacacacaactattattgtcactactgcttccttccaacttaggatcccctctattgccctgtggtcccttgtcccttaattgtaccctgagtctagacccaggtcccatgcccatgcccctaacttgaaaactcaagaacccatagaccacaaaactttaagcacttttttttttttctttctttccaaaatcggatatatctcagtggagaatcaaaactaatctgttaaggtaatacgattatttaaaggactaatctctcttaacatatattttttttcatacatatgaattatgattaaatttttgatcatatatttaagagataaaattatttattgattatgtcacatcttcttgtaacaaaattttaagcactaatacttagtaagtaggcaaccaaaaataagaaaataaaagtaccctgatcgacatgtccacatctagggaaatttatgcaatgcaaaaaccaggaaaaaagaggttgttagttattgtaactgtgccttccaaatcactgcaatctgcattagtgctattctgagaatctgagtgatgaaacatcaggacaggacagagtttttcttgaaccgaataaagccttgggcagggaagctatatacaattattaattattatcattattttggaacacatcatcataaaaaactgaaattacgtatcccaaatcttgagtgcatatggtagtattgtttgttctagttacttctcaatttccattttagtataagcctagtgactagcaatgcatatttcatatgaagaataatattagattaactaatatttcattcatagttacatgtaattttttttacagaagttacatgtaaggttttaaaaatgaaaaaaaaaaacttatatacagatctttgtgtgttttttacatgatctgaaaataaaattgaagtttcactttaataatctatgtagtaaagatcaaactagattaaactagattgcttaagtaaaactttaattctcattgcagaataagatcaaaagcatataagaaattatatctgagtatagttctttgaaaaatagtctgctatcacaatttcagcctagtttagatttctggattctataaaactgggtcgtgattgcaattgcagcaccatcaattacatttttctccgcatcaattatgtttgtctataacttaataaaagtgtgactgtgattgtaatttaaaaccttatgacatgtaaatgaaaaaagtacaatttccaagttacggatttcttgcatttgtaaaaaaaaaaaaaaaaggcaattccttttgtgatttaatggtcctagcataattgggggctaatgtgactatgcaaaattacaactgcatgtagtttgtttcccaagccaggaagcaaaactgttgaccaagagaggtggcacttggggcatgtcttcatgtgtgtgtgtgcacaagtttgtacaaacccaaatgaacgaaagtgaaatttctttagaccaagtgacacaagggtttcaattagcaaacacaaaacacttcatgttcatgtgctctagtctggaacagtgaacacaaattgataaaacatgcttttggaatgaccctagcacaatgtgacatgctctctactagtgtcaaataaaaagccataggggcatgaaaatttatgaatagggaaaaataattgcaagtggtggtatgaatggccccactttattaaatagtacggcagatccataagattctgttggggctgttccctggaagtacttgaaaaagcaaagaaggcaatatcctctggtgacacaccccatcatcccctctttcactacaccaaaagaacatgacacatcttatttcattgtcaaaattgaaaactcagatacacacgtatacaaagacagtgagggcaaccaacaaacaagtagtaactgataatattttatctcttaattaaataatttaagatttaaattttgaatataaaataaattatattaaagaaaaatatttattttatgtgtttttatgattttcgataaagattaataatcacttataacaaaactattttggactaatattatgattagcaaacaaaaatagacacttagggcatgaatggacactcaaatcttttgcctttatatttctcattgatctgttggaaatcaagcgtgtgggaagtcagttaagcttgtctggaggcataacaatgagaagcaaaaacggcatgtatcccataacatgtggcttatggaaaattttcccttttcattttttgttgatgatcaatatgtgtgtcttttgtctgcaccaagtctcaattgacaggaaattaatttgcaatgatttttcaaaatttgcgcacacagttcggcttccaaattttaatcatataattgtggttgtggttgtagttgcaattgcagtttccccacgattcttgacattacggacaaatggccacaatcgcaatcgcaatccgatggtgtgagttcaaaacgttgactttgtagttaaaattgtgatcacatactattttttttaaaaaccatgccataaattacttctaatccttgagcaataccaagaaaatagagtttattcatgcaatatgaaaactattaaatttcatgcttgtgtactatatggactacatggacgtagtatatgttaagaaatgtcaacccaatctctcgattctcaaataaaagaattgaacattgtgaatgttaggaaacaaattatttacttgggggaaatgtacttttaaaattcctttagtatgtgtttgatttaaagttgactttaaaattaattttgaatatatttttatacgtttaattttaggttagagaataattaaaattgattatggattgaaataattttaaataatttatacattagatttatagttttgtagggaattttatttctaatttaattttataataaaacatacaaacataaatcatattacttcaaaatcaattttataatttaaaaccaattttatcaacactcatcaaaatccacatttgacaaataaacaagagtaaataattaaaaaaattaaaataagttgaatgaaagatgtattaattttgaattagtcaaactagttcaatatgtagtccaagcctaacaagtctagggcataggtgtgtagaggtattggtagcagctgaagacccacgtctcttaatgctgaaggacgggtacctgcaggtgcaggtgtaaatgcatcactccatcccctacaaggaaaatcaatggcagtgaaatctgaccaagtcatcttagtttggacagaagaaatcattttcaacgagctctggtctgccgtgaaccaaatgccattaaccatagaagtatgcatatagaaatagtactatagttgtttcaagaacaacttattgtattgccaatctatcttcttataaggctgcaacaagttttactgcaatgggtaaccaacaacaacagtcttggaaatggagggtgaaaaaaatttaaaaaataaaaaaataaagagttgaattttcacaactgacaaatatgaaaagttttactccatggtatcacctatttacagaacatataaaactactactataacaatttcccttgtcatgtagcattgaatgcatgcatgttaattattgtttatgattttaatttatatttcttatactaaatagttcatacattctttttatcaaccagatatagactacttggtgatcatagttcatacatgcatggcaattgggaattggcaatagtcaaattgaacaatgacagcaagaattttaattctaaagctgagatctgatttgagtagatatattccttttctagctttgataataatgcaaaagggtctgtggaataataacatggggggttactgacttccgtgaagaagtgaatatttatccaaagaaaggaaggatataaaaagggttatgatgccacaaataggcaataaagataaaaataggggtttttagactgtcatgaggcctaacagtcagtaacacacagtgattcataaaagaaaaaagaaagagagagagagagaagggactgagacggaagaaggaaaagctcccacaaaaggcccaaagaaggatgacctcattgcaaattcattttatctgaagtgtagattggtttttttttttcttccctacacactttttcccatgatttccctgatgttaacaactcataacaaatggttgttttaagagcacagtaaaagggtttgatgcttgatatgcttttcataatttggactattatctgtctctctccgtctatctcctttggatctgactgaatagtactctgtaactaccaagaggcacagtcatgagatgaatgaaagccagggactttggggtggtgtggttgggattttgaaccattgtttttctacagcatttaatggggggtttgtaagaaactgagaagttaagtaactgcatagtatgacaacagaggcacagagagagaaaaggaaatttttagagagaaaaattgaaaataaaaaggacagacagttgattttgtgtaagattttcttttattgattgcggatgagacagtgttttactatcacataggaattgcttctctctctctctcaatttaattctcttcatagaaatatagaatcatccacctcatagattacatatttgtatttctgtaaaatagtcgctcaggctgtactcagagcaattagtttctttcatgcttgtataatttttacaatgattattataaaagtaagtaaagtttgtatgagtatgtttggataaattttttagaattattttaaaaaaataagaaaaaaatgagagtaattttgttataaaaaataaattttttattaattaatttttagtaatttattaatataatttttttaaaaaatgagatgaaatctataaataaattaatgnnnnnnnnnnnnnnnnnnnnnnnnnntattttaatttatgaaaaaactcattcatttttttctttatctaaaagtgtttataaaaaaatttatatccaaacaagttctatataaaagatttgaaattagataaaagagtaatattatttattatttattatttattcgtgttagtgataatgtgttatttaaccacttataatatctcgtgagttatgtttgagtgaccgtcgaataattttaaaattaaatgttacagaagaatcataatccttagaaatgtgttaattagacatgtattggaacgagattttaaaaaccatgcattagaataagtgttataacaatttggaagaccacacgacatgtcttaaatagttacaattggataaaattatttgtggtttaagtgcatgaaataatctcttaaagtgaatcttgatccataatctgacgatgtcattgatatcctttataataatattggatatttttccgttctgctactttgttacaaacaaataaataattaatagttttctttaaatgagaacactcgaatcagtaaaaaaaaaaaaaaggtttatagaaataaaatatttgtattcacatgtgtggagttttttctccctcccttatttctttttctgcgaagagaagaagtgattgtactagtccacgtgcgtagacccctaatgtactgttccagagaagcaaagcagacccaacggttccaggtccttctgccaccgtaccacagaagcatgttaattattattattattattatttgcaatgcatgaaagatcatgatattgacaacaaggatccctttgagcaccctacgattttattgtttagccataagtgcaatggtgattaggtatggcaacttgacccgcatatgtggacatccgtccgaactcgctccaaagtcaatgagaaaaaattgagttgatcgattttagatttgggttcggttttttcccgtatgttgaattcgaggacggttttggtgatgttgataaccgcctcgctcctgcccccgcccccaccatgctatatttaattatttacaaaaatacctttatatatgtggaatatctaaaggcttaattttattcaagaattaggagtataactaattttattttccaacaataaatatctaatgttgaaattttattgtaattacatacatttgagacttagcgcgatcaaattttatcctatgattgttgtttaaaattaattttctaatagcaatttttaagtgtttggaggcggggcgggggcggggaaaaccaacccccgtcgggggcaggggcaatttttttagtcccgccgattttcgagggcgggggcgggggtggttttgaggggcgggggcgaaggtggtataagtaaaaatcgcccctgacccgccccgttgccatgcctattggtgcttcatgtcttccgtttccttttacttgtgttatctttctcattgctaaccatctaatatatatctcttggtacacatgactcgatctgataggtgaggacccattaagccactctcattcattcatattgagctttgttccatttcacaaaagaaaaaacatgaagtactttagagctaactttgttatcaatccttttttcttctcacatctatgttttattagagataattcttttcgaatcaaatattttttttggtaaccaaaatatttgtataaaattatttccaaaaaaacaataataaattttcaccgaagatcttgagcatacacaatgaaatatatctacaattaggagttgtggaggcaattgctcctacaagattttatttttttttaaacatattcaataattttttttgcccccataaaaaataaatcttgctcccataatatatatatatatatattaaaatgaatgaataaaattataagattaaaaagaatatgttaatattaattttatcattttattattttaatttttacgattttcacatctctaatattaaatacgtaataagccaatgatacaaaaatataccttgatataatctcaaacagatagaaaaaagaaaaattatcacacttgttgcttttccttggatcaattaagtccttttagtttttaaaaaatgattcaatataatcttttacttttaaaaggttcaattatatcttttattttataaaatggattcaatttagtctcattattctttcgtttgctctaaaagttttaataagtagaacttaaattgatttttaaaaagatcaaattaaattcattttaaaaaataaagtatttaattgaacattttaaaagtaaaatacctaatagaattatttaagaaaaaaacatatgatctaattaaacatgcaaataataatagtaccaaattgaattagaataagtttagaggaaaaaaaataaactattttattatagactattttcttctctctactaagtaaaatttctgaatttatcccttagaatacacaaggtgaatatttatctctcaataaattataatttattgcatactcaagagtcaaccaagattcaaatactgaaacatgaacattatgaaagacaaatttttttctaaatatttaaaacagttatatatctaaaatttgaatttcacattacccattttttagacgctcggtggttgctttggtaccaaatattgatgcagcacctaagaaaggttactaaataaagttgtagtaactaggaacagaacataaacaacaacaatccttgtacgtctaaagtagtagctactgattccagctttgcatcaaatggaacagtttgttgcttcttaaaacatatttttctccaacagtattcagcgtacataagatgtgacagttcgtttgttataattggcgagagagggtgaggaaatgtgggttctcctcccacttgctagtgtcaagttttccatcagatggctaattggtttgcaaaacatggaacacgacaacaaccaagttagcaatgtaggaccctactactacaatgttcttccatgttcccagtcaaacatggcatggcaccatatatccgtatcatatgaattcctatcacggtctttgatgagatgacacaatttcacaaactcatgataagactttgccaattaatgtacattttttactatgctaccgactaccatataggaaaattatgtaaccgtgtgacattataatttgatgtgttattttttttataatgattgtattgaaatttgaatttaagatcttatatatatattatctgaaatctcttactactagatcgactctagtggttatttgacgtgtggtatagcacccaacattaaccattcaatttttaattgagaaaaaactaattcatagggatgcttacattactcaaatctatcatgaaatgaaatttttatgctcaaagttatatgataacattgcttgtgtcatgtaattggtcatacatgtatgaatccaacccaaaaatataagtgagatagatgctctttagtcctttgagtgtagacccaacccaatatggatttcctcctgcttcattttaagtacataggctattttgacaaaccaaaaaaagtacatatgttattattgtctttaaattaaaagttcaatgttacaaactaagaagaatgtcctttatatggtaaaggatttatttcatttaagagtatgccttaaaggagttatttcttttactgactttttctagaatacaaatttcataaatttcaactattgaagtatgtgatatcattttgataactatagatgtcaaattttaaataatttaaacatttataattttttaatcttatactttatattatcataagtagtaaattatgatcagataatcgtatagaactattttacacttgttagtacatcatttttctctttattcatattttaaaaggtatattactttannnnnnnnnnnnnnnnnnnnnnnnnnnnnnnnnnnnnnnnnnnnnnnnnnnnnnnnnnnnnnnnnnnnnnnnnnnnnnnnnnnnnnnnnnnnnnnnnnnnnnnnnnnnnnnnnnnnnnntatcaaatgatttttaaattatataaaattttataaacttaatatatttaataaagtatcttaaatcaatggttagattaatgaaatttaatgttaattaatataaagttgttaaatgaaataaaatagatatgacttaatcgtgaaggaaatggatcctctctctctaaatctattttgattatcaaatcttatataagtaatggttaaaattaaaacacacaagttctatgattttcttaaaagttacatggcttttataagtcatnnnnnnnnnnnnnnnnnnnnnnnnnnnnnnnnnnnnnnnnnnnnnnnnnnnnnnnnnnnnnnnnnnnnnnnnnnnnnnnnnnnnnnnnnnnnnnnnnnnnnnnnnnnnnnnnnnnnnnnnnnnnnnnnnnnnnnnnnnnnnnnnnnnnnnnnnnnnnnnnnnnnnnnnnnnnnnnnnnnnnnnnnnnnnnnnnnnnnnnnnnnnnnnnnnnnnnnnnnnnnnnnnnnnnnnnnnnnnnnnnnnnnnnnnnnnnnnnnnnnnnnnnnnnnnnnnnnnnnnnnnnnnnnnnnnnnnnnnnnnnnnnnnnnnnnnnnnnnnnnnnnnnnnnnnnnnnnnnnnnnnnnnnnnnnnnnnnnnnnnnnnnnnnnnnnnnnnnnnnnnnnnnnnnnnnnnnnnnnnnnnnnnnnnnnnnnnnnnnnnnnnnnnnnnnnnnnnnnnnnnnnnnnnnnnnnnnnnnnnnnnnnnnnnnnnnnnnnnnnnnnnnnnnnnnnnnnnnnnnnnnnnnnnnnnnnnnnnnnnnnnnnnnnnnnnnnnnnnnnnnnnnnnnnnnnnnnnnnnnnnnnnnnnnnnnnnnnnnnnnnnnnnnnnnnnnnnnnnnnnnnnnnnnnnnnnnnnnnnnnnnnnnnnnnnnnnnnnnnnnnnnnnnnnnnnnnnnnnnnnnnnnnnnnnnnnnnnnnnnnnnnnnnnnnnnnnnnnnnnnnnnnnnnnnnnnnnnnnnnnnnnnnnnnnnnnnnnnnnnnnnnnnnnnnnnnnnnnnnnnnnnnnnnnnnnnnnnnnnnnnnnnnnnnnnnnnnnnnnnnnnnnnnnnnnnnnnnnnnnnnnnnnnnnnnnnnnnnnnnnnnnnnnnncttgtaattataaatatagttttctcactatatacatcttctataagaatttcttttacttgttgctaaataaagttcgcaagtcataaaaatggatcatcaaatatgaaagccaaatacaaatgcaactatgaatttgtcttaaaaaaattgataattaacaatatggatataacacgagtaacggaatcagaaacaaacttagaaaatgggcagagaataaacaccataaatagagatgcaacatcagtacaaacgacaaaagctttgatggccattaccaacttactaagggaaaaccaatttccagttatgtacgtaatacaattttaatgccttggcctttttctttagataagattcaaataaagtcttgcaaattcgtaaagtttgaacttctcataattaagattaaaaaaattaatctttttaaattttgattagtcaatataataagttatgaaaaaaattatccatgttttcttcttatgtattccttaaaatattacatatgaaaaataatacggagacctcttaaattcagctatgacccttcattcatctccttcagaaaacttttcaaatttggcatcaaactgttcctgaaacgaaatcccagttcaataagaaattcaaaaatgggcttggccacgtaacagttactttgcaggctattactttttgcaccctgattttgcttcctgtgccccataggaaagttaaaacatcttgaatgaacaaaaatgtcctttaggactattttttgggttccgaaacagctcttccgtaagcatataggtatttcgaagtactattttttgggttccaaaaaaataaacccaaaacaatgtaaaacgagttttggaataacgaatctgaaatatagatcaagaaacttgtccttatagagcatactatccaaaattatgaaattaaggaatctgaaaacacgttttttagaaacagaatctggaactatgtttgcataatcttggaacaaccaatctagacataattctgaattacgttttctaaattacttaatcaggaatggaacaaacaaatttcactattctggatttgtcaattcaaaaataaaaccacatttgaaaaaaaaaattgtacaaggtctcatggcacaaaaatgttggtttcagggggagaaaaacgtctgctggaacatgaattttgctttatatgatttttcttcttctttgctagttttcaacactttaaaattttcttcctattaagctttagaaaattctatgcaagatactatcaagaatatctgaagtgtgttgtgggatatattgactaagaggtgcttggaattaatcacatgtataagcatctagcatataagagatttgaaatgtgtttctatttctcatgaacattatttcctactataagaaacacttgctctatggttaagaaaatttgtaacactaatttcctttaagtgttgcaggcttgcattgagaattccccatatgaaggtcctttgaaaaaagtgctcatgcatggtgttatgctcattttgagctaaagagatggaatcatggagtgtctttacgtagcgagtttggtgttgccgaggtgttagagctgcaatgttgatgccaacctataaaccaggactcagagcaatccaggaaatatgagttgttgtcaccaccaaaaggaaaggggaatagaaaagggaggtgagtgccgccacacaaagaggagggggaaagatgacatgcattaaggtttgagacaaaagggtatttttgtctgttcaacttatttttagttttttatgaagtgtaggaagtaaaagatgggtgcttgaagcagtggcccattttgcaacatctaacatcaatgttgaattaacgaagttgtgtatttaatgggctagaccctttttacttaggttaaagtcataaaaagtgatgttaaacataccaatattaatcccttgcatagccttatttgtccaaagaaattgggaattgctattcccacaccgattttcctaaatatactcactctttaagaaagtccaaaatgtcaaatatatccaaccttatcttccctcccccccttattttttttaaaactaaaattctccctctcatcccctacctctgtcgcgcctctctgtctcactctttagtctttccaacatgccattaatagaactagatgcttgcttcatcttttcctttgtgaatgtctcattgtctgaaaaagtaatttccatctcaagatatacttctaccaagtcccctggatttcttgatattgtctcaggaatattcatgtcctataaaaaaaggaagaaacaataaataaaggtaaataaaaattaagaaaaatgaaaatgaaaatacgataaaaacaaaaaagaaattattatgcaatctagataattgcaaatactaagggaacttaactcatttgattaagcatgatgtgttattgtaaattttttattgcaaatactaagggaacttagctcatttgactaagtatgatatgtgagttattataaattttttttatattttttttaattctacaaataaaaaaggtaattgcaaataaaacttaactcatctgactatagtcccttacagtagcaccaaaaacttgatgtaccgcaagcgcatgatcttgtttagtagtataaaagattatctcctcaagggctatatgaatgctaaattatttgcaatattttttttcacatagtgagaaataattacaatgttatctaaacattaataaatttaaattgggaaagtgagaaataaagtgaaattatagaatgattgaaaattcaaaattataaatgggtgaattattaagcaggaattattaggttttaaagattatttctttattatgttagatttattataagtgaattttcctaatttagtgattggtttcttttaaaatcatgataatgtatttgatttgattaatccttattaattttcgtaataattaaatatcataaaaattaagatttatgataattcaaagaaccccaaatggtgaaaactactttggtgatttgaatctttaggttccattttataatttataatgctaaagttcacctttttgctaatttccgtaaaatataagatcatgtgaataagaagaaatcaaattagtaagtataaataatttctaaaatttatttaaaataattatctcattaacaaaaggagacaaatacaaattaaannnnnnnnnnnnnnnnnnnnnnnnnnnnnnnnnnnnnnnnnnnnnnnnnnnnnnnnnnnnnnnnnnnnnnnnnnnnnnnnnnnnnnnnnnnnnnnnnnnnnnnnnnnnnnnnnnnnnnnnnnnnnnnnnnnnnnnnnnnnnnnnnnnnnnnnnnnnnnnnnnnnnnnnnnnnnnnnnnnnnnnnnnnnnnnnnnnnnnnnnnnnnnnnnnnnnnnnnnnnnnnnnnnnnnnnnnnnnnnnnnnnnnnnnnnnnnnnnnnnnnnnnnnnnnnnnnnnnnnnnnnnnnnnnnnnnnnnnnnnnnnnnnnnnnnnnnnnnnnnnnnnnnnnnnnnnnnnnnnnnnnnnnnnnnatatatatatatataatttctaaattgttagagtctttattgaacttttagatcatttttttctttgttctctttaatttccaagttttatgataactctctccataatgaggctttctttctggaatcataaaagaatgcatctcataaaggtatttattatgattctttgtcatattgtcatcttaatatatcctactttttcttttatatcttagacttctcattaatcctattattcaaatttcttaatcttgaaatttagaggatatgcgtcattcatctatactccttcaatccaaattcataactacaactcatgcaaatacataaataaacaaagagttagttaagtaaacaaaaaaatataaaataaagtcttagaaatctacatatacataaatatgaaaatcctaatagtatctgatcttaataatataaaaataacatgatatttctcatacattgagaataaaattatttttatgaaaaaaattgaaaataaattcaaatttatgagacttgaatccaaaaatgaaaattttcaaattgaaattaaattgggtaaaaatataaggataaatttttaattcaagtttcaaggatgtatttatttattgtataaaattcatggttttcgtatggtacgaataagatataaacttgtaaagtactttgcatgattcatagaggttaagagggaaaaagtaacacatgtcacaaagtgaatgaaaatgatgatggtttgtgttgtttttgttttgtagttgttggtgtgaaaatgaaataaaatttgtaacgctcttcaactcccgattctctcgcatgcctcaatgaccgattttttcgatcacccaaatctgttaaagtaatctatatgtaagctctctctctctctctctcccccttcctccctccctccctttctctgaaacttcctttgccattaccattgacaaccaacccatcccttcaccattctacatacttggtttgtgaatcttattaatcaaatcattatattgaacttcattgtttgtgtgagtttctatatccttccctctattttttctcttgttaacttttttttaaaaattttcacattcttctttcaccttgtcagcactcaaaacgttgataaaaaggtatatgaataatgaaactacatgttgttgttggccattttgtttcttgtattattattattattattattattattattattattattattattattattgttatccaagttccttcattggtttagaaatgtgagagaatgaatatccacaatccatttcaatctatatgggacaggtgtgtgtgtatgtgtcaagatgaacataattttgcaatatgggacgtgctgaaatttctatctagaaacatgcaatgcaagttcttctaggagtatctattttggatttttttcatgctagaaaataccaatcgtagagtcctaaagtcaaagagagactcaagaaaccttacgtaggtgttctctagcgtgaagaaaatctttttgtaaacagtgagagggataattaattttattgtggtatttaactatgtatgtatatgtaatgtgtaggatgggcagagtaaagctaaagataaagaggttggagaacaccaatggccgccaagcaacatatgctaaaagaaagaatggaattatgaaaaaagctgctgaattatctatactttgtgatatagatattatactcctcatgtttgcaccaaatggaaagccttcattatgtagggggaggtgcaggtaaagtctaccattcaaattgtgtcatcatatcatatataattacattcatagttatgtactactagagcacccaattatatgaatgcttcttttttacaacaaaatgtaatatttcattagtaagtttggattttctttatcacaagatgtgcttaaaacaaaccagaacaataatacaaattataaaacatttattccaacaagtgcccttgcaactttccaccatacataacaactaagaagcctcaaagttacataacaagaataacacaaatatgataaagtgtaaacaaagttgtatcctttgatccctctaaacaaacaatagcccaataaagtcataaactgttgatctcgtagccaaacagaagcaacggtttgatgcatcatgtatacaaagaaacaccaatttccttcatttttgatttgatccatgtccatgatataaacttgacattgtcaataacaaaggtcaagtcaccaaatgtgattttgatgtgtccatatggaccaaatgactaatagtcacaccacccaccaacctttcacatccttattcatgtaataggtgggttgcagtttttgattggttgttacataaaacataattagagttgctacatgatgttataatttgctttctgatcaaattttccttagtttgaatcacatttaaggttaacctccattcaaaagcttttattttttacgatgcaagtaaatgccaaagcattttaaagaattttgccccatttacctctccataattgtgtaatatatcatagacatgttataccacatttatgctctgaattgttgtgtcaagcccaatcatctattttttctttgttggtccatgattaccaatgtcatcccacatatgagttaccaactcattctcccacaaaagcagcccttcctttaacataactgtcaacatcactcatctctccttcacacccccatctttgcattggttgcttttttttttttcctttcagatttagcatataatctctcatattctgtagacaaagtaaagcgactagtccctatagcatgcaaaaagctcattgaacctctgtttcccaaaactcttgaaatgatttttgtgaaatccccctcctttatctcacaggtttaattaaatcacaccaccattgagatcctcccaatgtcaaacttccatagtaagcaatcatttaaattcaaaacatcatatttaccttttaaggcacttccccataaactctctttctcgaatttcaatctccaaaaccactttcctaacatagctttattaaataactcaagaatatttatacccaatccacctttttcataggagaacacactttatcctaacacaaccaactcaaccccaagaaaacatctttgtaatttgtttagaatgaccaacacattttttggagctccaaagaaagataaaaagtaaaaaggaatatatgttaatactaacttgataaaacataccctcccaccaaaaaaaggtttctcctcctccaaggtgtcaatttcttgcgcatcttatctatgaccagttttcacatgctaaccttactcgtgtccacatccactagtaatcccaaataaagaaatgaaatattcatcattctacaattcaaaatagtggtcaatctaagaacatccctatcttccaaatgaattcctatcaagttactcttaaagaagttaactttcaagcctgcatcaagctcaaagcatttgagagtcacattcaaagaagtgacattgctcacatttggatgaagaaagagtgaaccttttgttgctttatttcccacctccagaattgaaattaggcttttcctctccgcttccttcactagcccacttagcccttctctaaccaagataaataagaaaatagctaagggtctccctgcaccaaccacttttggatatgaaattcatgtgtgggacttccattcacaaggacaaatatagttgttgattggaggtaacctttaaaccacatgatccaagtttcacagaaactcattctatgtagcatgtatatgaggaattcacatcgatctgaatcataggccttctcaaagtttgctttaaacacacaacattgttgtcttgacatctaatgtgtttagtaatagtttggctatctaaaattgtgtagtaggagatttgggccataagaaaagtatcaataaaaactagctatttgtgtagatatttaagaatgttttttttttataaattctttaccgcttatgtggtaaaattgagaggaattttaagaaaaattataatcaatcaataaaatttactttttaagttgtgaaggagttatgtgatttaaatcatttgatttactctagtttttcaattcttccaaaaatgtcctaaggttggattgagaatttgaagctttgaaccctaggttaaaaactaaagaatttgggttgacttcatggaaatctgatattaaatggaccgaaacattgagaacactttcaaatacaattatttttggactttgcttttagcttttgattgtttttttaacttagacaaacaataatagttattatgtgctttgaaccaataactttgtataataagtataaacatatctatcatagttatatgcatttagaaatatagtatatactatatggattaatttaatttaaatttaattacaggtaatcaaatatagtaaatttagttttttctttcataataactgctttaaaggtcatcacaatgataatttattatcggttgacaatatataaatagttattaagaatgtttgacaattaaactcacaaatttaatgagaatgcattgataatataaaaacattttacattgttatctaagcataaattgttagatataataaaaattattaatttttatattaattacttaaaaagttatacataagataacttctaattggttaatagtgtaaagtttttaagtttgcctaaactttttattttctgttgtccttattcatgatctattattggaaaaattatatattgatattttataatcttatcaactttctaattattcattctccctctttggtggatttagtaactttgaggaggttattgcgaagtttggtcaactaactcctcaggaaagggcaaaaaggtgcaattaaaatcctttcacacgcagacattcatataatgtattttctcctagttatataataatttaacaaagtgttttccaatgaattgcaacaggaaattaaatactcttgaagtaagtattttcttgaaactcaatgtccataacccataccgtgatatacatgattctttttctctttctgaaagcatttatggttaaaattattatgcttcttactaatgagttgagttcatttgagaatttaggcactaaagaaaacatttaagaagttagatcatgatgtaaatgtacaagaatttctgggtacaaggtatgtcattcttgcactatttcaattattgttcgtttaaaggatttggttatttatataagttcaaacactgaaacattctttttatttgtttgttacagtagtcaaactattgaggtacccacacaattaaatcctcgattactttgttcatttatagggtcattgttataaatcactaactgacattgggcaggacttgagtaatcaagccaagctattacaaactcaaatttttgaaactcataagagattaaggtgaatcttttcttcttaagctatattttcataaactaatggttatgctttggttgtaattacaagttattcttacaaattaaataattaccttagaagtcatgcttagtatgatttctgattggttgataatgtaaaaacttttatatttactgtagatgtctattgaactctttacgtataactaatatatataataacaatgcaagccaattacaaatcaccatgtgttataagttggttgactattattataacctttaaaagcataccaaagatgattactaatttattgattacactaataatgcatacctattaaactctttgtatataaataatatgtgcactgatagtgtaagactttttatgtcatccaaattccaaacacaaactatcatgcataataagttgctttactttaataataactatttgagaagtcatatgcaaaaatgatttttgactagttgataaactgaaaacttttacgcaaatactgcatgcccattaaactttttatgactaaatgatatatgcccgataagttggctgacaataataataactaccttaaaggtgacatcaatgattgtttttattagttgattgtgtaaaaacttttatattgacattgtatgcctattaagctcattatgaatcaatatatgaccatgtaaaacatttttacaatgtcatctaattgaaaactaccatgtatgtaagttagttgacttcaaacatttttctattaaactccttaattattattaggttatacagtcattgggcagaatttgataaaataagcagtgtggatcaattaggacagatggaaaattcgcttagggagtcacttgaccaaattcaaacccgtaaggtatacattgtattatcacatactcgttcttcttttccaaagatacttttatgagttaagtttgtcattatagttctaaggtaatcaataattttctttatggtctattgttgattaatactaagaaatttatttgttttatttagttgttgtcttgtttatctggataaattggcttagaggatcaaagaatcaaggaaaacatacaatttcaacccttatagttgtcaataaaacatccataatagtttcatcaaactaagagaataaggcaaaccaaataaaaatggagaaagacaagtagtataaatatgtttttcaattcagatccctaaaatgtttatagaacttaataataaatgttttttgttgaacaaaaacattatagaaatatttcatcctcaacattgcattgtttataagcttttcattgtatttcatgtctaaattttaagcttgatgtggcaggaaaatataaaaaagcaggaacaacttgtttcgctgcaatgcaataaacaggtaaaacaaattaggtgataacttttttttttcaaaaatcagttttaatgttatagacaaaaaagattagcctaaattatttttatatcccagttcaatgagatgaatattcccttcaatatgtccgcacaacaacaactccaacctctgtcatggattgccaatgacaacggccaaaatatagttctacctgagcactcaaacatgtttctccacaagtgagttatttttctaataggagtgcaataaacatactttctaccacacatcatcttattggttgatgtttactgacaattacaaaattaagggagagactcatttaatgagaagtaaatttcactaaaaattataattttcaataaatttcaaccgctagtagaatactaaaagaatatgttagagagtgtgttgtgtagttagtatttctcttttctaaagtagatttatatttaatgcttaattttttattattagacatttatctcagtttgctaaacctatttatatttgttattaatcattattgaagaatattttattgtaaggatgtaaattatggtatcaaactcaataatctaattagaacaatgttttaatccaaattatcaacactttgttttcttctgcatatgaatttatataaaggatacacaataattgatgatgatggtttatagctattgaattgatctttggggttacatatttgtaaccttttatttgccttatcctcagagatgtagagggatttgtaagttcatcttttgggagttatggcagttatcttggctccagtatcaaaactgatatgtcaaactcaacacaagaaaatgggatccttaatgacatgagcaatatttcccctatgagtctccaattgaatgggcagtttccatgtcttcaatacaattttaatttattgaacaatttgaagtgtcaacaaacaatagagattaacccacatgaaaatcctgtagattatcatatgaatggaggctttgaagcacctagatcaagttatgattctaacaatcaccatggttgggcttccacatcagggccttgtggtgttactatgtttgaagagcaattatatgcccaggcaagcttcactaaagtgaactttggcttcacatagcaatacctttttttatttgattatttttctagcattcctattgcatgatttctttgagatagttgcaacttttgatagccaactagaaacattagcaaattacaagagagaaaaaggttaatacaataaaaggctttctaatttatatttctcggcccacaagcttcataatttttgtgtctacgaatttcctattgttgagtgtatatgagttaccattttttttaaatatgacaacaacgatattataccataacctattaagagttattctagactttttcactgatgatacaacctgacatctatttgttttgtttgttatatttaaaaaaagattcaggttgaatagtatttaacattatgttgtttacccaaagaagttctaaatatagaatctagaagcttatatcttttgcatagtctatgaagtcaaattcagcttggctaaaacagtcaaatagtcaaaaatggtaaatttgacatccaataattgatgcaatgtgcttggaattgaaaatccctccatgttacatatgtatatgtgtgtttgccactttttcttgtggcttgtagttaatactttaaaaatacaactatagtcattttagctcatttaaatcaacaagtagaataaaaatttaattgttattaaaaatacatctttagagtatttatgacttattctatctctgtctatataataaacaaggaaaaggattacatccttaaagaatcttttttatggaaaatattttctctctatgaatgtgaagatttttagttaaaatagtattcaaattgaataaatatattaataagagagtggtttttttctttctttggttgaatctttgcaatctatgggtttctttggcccctgacttgctgcaaataggtctgatactaatggtccctcccccttatttttctcataatggtttaaggttcatatcactccacatctcttgtggttttcaatactactatgttattcttgaaacatggcataattgttttatcccttatgaatcgacatatatttcttagtagatttgattgaagaatgaagagaattttttaaggattttcattggacttaaacacaatatactatgcaaaaaaatttgtctaggccttaccctatattctcatttatgaatctaatggcactaacgtagagttcaactttacttataaacttcaattttttgagtgcagcaaccaaattgattcactatggttttgtccatccatctaccatcaaggttgctagataaattcagccacatttgggaaatttcacattcttggagaattttgcctcaatggatgagttttatacacaactaggaagtaaccaaccaatttttctatggccccagttagcagcagtgcctgccttaaaaccattcattcactgattaggatgaatcaaggaaaaggaaaagaagtgctatatttgatcctcttaataattaccaataataggttttctttggttgtttctacttccaccttataaatcatgggtatgaaggtttctaatgcatgaaagcatgccacatttttcttccttttttacatgtatataaagattagcggaagcgctatcacgcttgtgtgtccacatttctattttcttatcacatttttttttgagttaaaaatattttttatttcaatttatcgtactgtgcattaatgtgtgttcgagtagtataaataaatagaattatatacagagaaaaaaagttacaaaatattgcattcataaaagtcaaatgaaaaatactatttatgtataatactacaataaaataattgtgaatcatagatcttccttaattgacaaaccaaacaatgcatgcatttcatgacaatctttaacttccttaaaatttatgtaaacaaatgtcaattttatcattatttatattaatgaaccaatgatattaaatttgaataattatttacctttcaatgatttttcttaattctttatagaacacatcaacctagtttcttccttttgaaaaactacaaaataggtcacacaatgtcatgtatatgttgagtgattatttttcatgtactttaaaagtagttaattaaagaactaattacaacctcaagaatcggaacattttgttttgcacgaaagtttttaatataacatgtatcacttgatattgcattttcaaatctcctaatatagagaagaaacccttaggttagaattgattagaactgagaaatttaaaattaaatatatgcacgtagtaaattagagtacataaatatttaaaaataatctcactacattatctttctatcatttgatacaataattctctttttaccattttccaaagttgagttttatctgttgtcattgtagaaccccacccaatagaataaatttttagaggtgaacatgtgttaaagaaaaataaaaatgcaattgattgattgaaaatgacataatattaagattgttagtaaaaaaattgttgaattgtgtaatttaaatttcaaattattattaggatttgttaggttgttacaattttttattattatattttgaataggaattaagattagatcagtttgttattatttcgtattattaggaggttgttgaactactcttatatatataaaaacctcactttgagggaaaatatatgaaagagaacatagaaatgaatnnnnnnnnnnnnnnnnnnnnnnnnnnnnnnnnnnnnnnnnnnnnnnnnnnnnnnnnnnnnnnnnnnnnnnnnnnnnnnnnnnnnnnnnnnnnnnnnnnnnnnnnnnnnnnnnnnnnnnnnnnnnnnnnnnnnnnnnnnnnnnnnnnnnnnnnnnnnnnnnnnnnnnnnnnnnnnnnnnnnnnnnnnnnnnnnnnnnnnnnnnnnnnnnnnnnnnnnnnnnnnnnnnnnnnnnnnnnnnnnnnnnnnnnnnnnnnnnnnnnnnnnnnnnnnnnnnnnnnnnnnnnnnnnnnnnnnnnnnnnnnnnnnnnnnnnnnnnnnnnnnnnnnnnnnnnnnnnnnnnnnnnnnnnnnnnnnnnnnnnnnnnnnnnnnnnnnnnnnnnnnnnnnnnnnnnnnnnnnnnnnnnnnnnnnnnnnnnnnnnnnnnnnnnnnnnnnnnnnnnnnnnnnnnnnnnnnnnnnnnnnnnnnnnnnnnnnnnnnnntgtcaaagtacaaggccaaatgtttttttttttcaactcttcgtataattgaaagatacccttgaatctaaatttacctttaaaaccaaaaaaaatatacataatcaatgcaattttgtttttgtctattaaaattcttaccaatttgtattccaataataaaataaataaataagtataccaattaatactattatggaaagaggcaatacctaagtttgaaatactaaaatttctttaaaaacaatttttgtgaagttttcatcatctccattaagttggccttctttaataaggatttttgtaaaaacttgagaaacacttcttgacatagcaacatataattgaccatggttaaaagcatgtcgtggaagataaattttaacattgtgtatggtctgtccttgtaacttattaatagtaattgcaaaacttagttttacaggaaactacttcctaagaagaacagaggaaagtcccacactctttgttatcttatgactaattttaggcacaaaagctcttctcccatcatggtggcttgttaggatttcaacaaccaagatgtccataacaaatccaagacatagtagtcttgtcccattacacaggctggatttagggccaatgtttcgcaacaacattaagagtgcaccttttttaacctttaaaatatgtggagacagacatcctggagcaatggagtgcaagtactcctgttgatataagttatgtgtgtcccctttgacctcatcaaatgataacaaattctccttttctccaaggaaatgacttattattaagtcattaatttttttcaacatccttattttttggtgtcaatatggctctttgtatcatataagatgaatccatgtatgagattctaattggggaaatgtttcttctataaccttttgtactgaactttgtccttcccatgttatgcaagttagtggggtattttgaccatatcaccatgcttggtaggttcaatatcatttccaatgtgtaagagatattctacaaaattatgaccttgcaataattgcatgttttgtcacaaatgtaggacctttgtgatagcccataaaagagacataacaatacatgtaaaaatcatttgtgccttagtacctttttgaataacaggaagtacttgacaaaaatcccctcctaataccatcacttccccctcccaaatggagcatcacaatttagaatatcctttaatgaacaatctaatgctttcaaagcatatctgtttgtcatgggtgctttatccaaaatgattgttgttgtttctctaattagctttgcaaaatcatattgtttacttattgagaaaaatgaatctacctctacattgataggtatcttaaatcgagaatgtgcagtccaaccaccaagtaatagtgtcgtagctatcccagatgaggcagttgctaagataatttgaccctcacttcttaaatttgcaatttaagtgcaatagaggaatgttttacttgttcctcctggaccatccacaaagaaaacttgacttttttttttatggtggataacacccataatgactttaaaagcacttaattggttgttatttaactttcatgcacattccacatcttaattgggtacttggaccaataattactcttgtattccgacagtgatattgttggaaaatcataatttgtgatttgttctccatgttgaatcaaaagaccattcaaattcctcaataacatattagtcaaggttgatcacatggtcgtgcttgttgaaggataatcttctaccatgtagatgtaaaactcaacctagagagccctaacatcagttggttcacaaaaaattaatatagtgacaaacaacctccttaaagcataaggaatttgtagacttgatgcgtcaactaagcattcacaaagactattgtcactttctataaagccccaatgctcaaccgttattttgaatgtgggcaaacatgtttcaacgggtgaaagtaggtattcccaattggttggacctcttatatgagataacaaaacacgctagaatttcttcccttctgaaggagatattgtatagatcctaccaacaactttcttgtttgaccttctttggtgtcattccttatcccctctgtgccaacaataatgctccagaatcactctatataaatagttcctagcttgtggatctctacaattcagagcaaataattgtgtcagcatggttttggagttacgatcattgttcggtacattagtgattctttatgtctatagaatcttacttgatgacgatgggtaaatggatttgtaatctctcaacacacaaatatattatgtaaagggtaaatctaaatgtgtttcataaagcttttggagcacacatccatctgcatcaacatattgttgaacctcatctacatgtgatcctttatgaacctccattgctattcgatcatggcttttgtagacatatttagacaaatatttaatgctcttgatgctattgcatacttcaagatttatatgacaatgatacttcaacaacaaccaagggttttaaggaaccacccatctattatcaacaaccatatttctatttacaagtattggttctccaaatcgtcttctatactccatatatgagtcattaccttggcatgtctcttctcaaaactgtttaggatacctttttttgcatttatcattctttatacatggagattttagatttactattccgcaagatccatgtgttgatttgagggggagttgcttaaagcacaaagaactttgaagtcaagaaaggattgttttggactttcaacatgtccttgaagcactgaagaaaagcttgtgatcaaatgtaaaagaaaggaagttttctgatgatccaagtcattgcattcataccattcataagtttaagaattaaatcacaaagcattggtaaattgttttgagtttttgaaataaactaagtatttttggaaaaatagcatttcactggtttaatagattattataggaaaagaatcgattattttgttcttgatgttttctggaaatttctcaagaacagtttagtcgattacactattgaattaatcaattattttggcttagatcacacataatatgccttggtgacttttttaatcgattaccaccaagctgtaatcgattacatcagccaaaaagaaaatatcatatctctggtataatcaattaccaattattgtaattgattacttagttcaaagcatatttttcatctctctggtttaatcgattaccaattgttgtaatcgattacatagttcaaacatatttctcatagtgccggatgtaatcgattacacgtcggaataatcgattaaattgctcgttatagttacccagaatcattatgaacggtttaatcgattacaggagcctatgtaatcgattacaagtgctaaataatcgattacaggagcgcttttaatcgattacaggcggttacaaatatcactataaatagaacccatgctcagctattttagaaactggagtgattcgtattcaaagcattctaaagcattctaaactttcattaagtgatatttctgggttcaataagttcttgcttccataaaactcttatgggtctttaagggatgagtgaagcaagattttctcttttcaaagtttaaggaaagttatgttctgaatttgtaatctgcatacaacctggtaaaactattcatatgcatttcattcttggattatcaggtgacctctttccttaatctttgatgttgtaattcctttttgaattttgtgttggtttgtctattgtaaatgagtttcttgcttgtaatctagagatagtgtttctctagggggtttgcttagtagtgttctcagtggggtttgtctctaagaatctaatagtattttagatttctgaattttatctaggattgataaagagaggcttgtaataacttgtaagaactgaaatttacaatagtggaactctactctagtgttgagtagaagaaaactggatgtagcttcatagtgtttgtagtgaactagtataattccttgtgtgtttatctaattctgcatatttgattgtcttttgtgaattcttgttaattacttgattcttgaagcatcacatctcttgggttgatctttggataaaggttcttggttacaaaagtgataaagatccaaaagggaaaaactctaattttgatcaataaattttttaaattaccaagactaaccaattcacccccctcttagttaagtgtgaagtgttccatattttacaattggcatcaagagctaggtcttgtaagatactcaagatcacttttctttcaaaatgaatacttcacaaataaccttcaaggaaggtgcatccttaaacagacctcctttgtttgagggggagcatttcagtttttggaaaaatagaatgaagatctttattcaatccaatgatccaggagcatggaatgctatagaaaagggtcctagggtgcccatcaaggtggtagataataacataattcccaaggattgggatgagatgaatgatgatgaaaaaagaattgttcaacatgattttaaagctaagaacatgataacttctgccctttcttctgatgaatttttcagaactgttagatgtacaagtgccaaagagatgtgggagatgcttgaaattacccatgaaggaactgaggaagtaaggagatcaaggaagcactccttgattcatgaatatgaaatgttcaagatgaatcaaaatgaaagtatttcttagcttcaaacaagattcacacatatagtgaatcatctcttgggtcttggaaaaacatttgatgctgaagaattaaacatcaagattttgaagtgccttactagagcttggcaaccaaaagtgacagccatcaaggaatccaaagatctttcgaaaatgaccatggttgccctctttggtaagcttcttgaatatgagtttgaattatcacaactaacctttggtgaagatgcagaaagaaaaagcaaaggaatagcactgaaaactgcagcacctaaggtggagaggaatgaagactctaatgatgaagaagatgaggaaagcatgaacttgattgtgaagaagtttagcaagttcctaaataagaacaagggcaaaagatttacaagaaataataagaacaattccaccaacaacagctctagcaacaacaagaagattgacaacaactttacttgttttgagtgtggtaaacctggccacataaaatcggaatgctcaatctacttgaagaaacaacaacaagacaacaaaggcaagaaggaaacaaagccaagaagagcatacattgcttgggaggacaatgaatcttcaacctctgaatcctctactgatttagaagaagccaacatgtgcctcacctcaattgtcaatgaagaaaatgatgatcttctggatgaagatgatgaggtaacttctgaacttgatcaagctatttctgcttttcaagaaatgcacaaagaggccaaaaagctagctaaatcaaataataagcttaaaaaaagtattggggatcatcttgctaaaataatggatttacaaactgaagtttgtaacttgaagaaagaaaatgaaactttacttcaagctacaaatcaagtggatgtgtttgtacctcttcctctacatctagtgacaaatataaaatgctgcaaaaagtttttgatgaatatagatccaatcaagaagaaaaatatttgcagattatttcaaagaatcaagaactgattgacatcttggaaaaactcaacaaaggaaaatgtgatttagatgatatgttgagtgcccaaaaataggttggtgatgcttctggtttggggtataaaaagaactttaaaaatgtccaaaagacaacatttgtacctccaaaacagaagaaaaagaaaggggcaagattcaatcaaaaagggttctcaagaaaatcatataagattatgacttgtcactattgtatggaaaaaggtcatacaacttaccattattttcaagaaggttttatgtcccaaatggtgagtgcatttgggtagaaaagaaaaagaaaacaactaacccacttggacccaaaatcaaatgggtaccttctcctttgaagtaatttgttccttttgtaggtatgtcttagagcaagctcttctctatggtatcttgatagtggatgctcaagacatatgaccggtgatatgtccttgctcaagaatcttatttttaaagatgggggctatgtcacttatggagataacaacaaaggaaaaatcattggtgaaggaagcattggtgatagcttgaataccaaaatcagcaatgtactctatgttgaaggcttgaagcacaatctacttagtattagccaattatgtgacaaaggcttttccttcaatcaagattgctatttaatttatgatggtaagagtgaagaggtaatttacattggcaaaaggaaaggtaatgtttacttgctttctatagaccatgcattatttcataaaaccacatgcttaatgagtaaaatagatgaaacatggctatggcatgggagagctagtcatattaatatgcatcatatgaatcaacaaaagaaccatgtgcatagaagaatctgtccatgtaatttgtgatgaatctaacccctcaaaagaggaaaaagcttgtgatgaagatgcaggtcaaatagaacaaaacattcagcttgagaagatgtcaatcaatgagaagaatgaacctaatgctgaagaaggtccatcaactccaagtcaaaggcctaaagagtggagaaccacaagagatatttcactagataacatcattggtgaagtatcaaagggagtctctactagatcttctcttagaaatttatgttgtgacatggcttttgtatcccaaattgaaccaaaagatatcaatcatgctttgcaagatgaacactggatgcatgccatgcatgaagaactaaatcagtttaaaagaaatgaagtttgggaacttgttcctagacccccatctattaagcctattagtacaaaatgggtctttagaaacaaactatatgaaagtggaattatagtcagaaataaggctagattggttgctaaaggttacaaccaagaggaaggcattgactatgaggaaacttatgctccagttgcaagattggaagctattaggctactactagcatatgcatgcataatgggttttaaactttaccaaatggatgccaaaagtgcttttttaaatggttacatagaggaggacatatatgttgaacaacctccaggattttctaattttaaacatcctaatcatgtttttaaacttaaaaaagccctctatggtctgaaacaagctctaagatcatgttttaattgaacaatcttttgaaagtggcaatgttgacaaaacattgttcatcaaaagacaaaaggatgatattctattggttcaaatttatgttgatgatattatttttggttcaactaatcaaaaactttgtaaagaattttctgtagctatacaaaatgagtttgagatgtctatgatgggagagttaacattctttctaggacttcaagttaaacaaatgaagaatggaacttttctcaattaatccaagtattgccttgaagtgatcaagaagtttgaaatggagaaaagcaaagatgctgcaactcctatggctacctcaacttatcttgacaaagatgaaaaaggaaaggaagtggatgaatccaagtatagaggaatgaatggctcattagtttacttgacagctagtagaccggacatcatgctaagtgtttgcttgtgtgcaagataccaagcaaatccaaaagagtctcaccttacagcagtcaagaggatcatcaaatatctcaaggcaacacccaaagttgggctttggtatcctaaaggtgcatctataaacattattggttattcagattctgattttgcaggatgtaaacttgataagaaaagcactagtggaacttgtcacctccttggaagttcactcatttcatggcattgcaagaaacaagcttgtgtagctttatcaactgcagaagctgagtatatttcagctggtagttgctgtgcacaaagtctttggctcaagcaacaattgcaagactatggagttaatctaaaggagataccattactttgtaataacacaagtgctataaacatttcaaagaatcctgttatgcactcaaggaccaagcatattgagattagacatcatttcataagagatcatttgcagaaaggtaatatcaaggtagaattcattgatacacatcatcaacttgctgatatattcactaagcctttacctaaagatagattttacacttttagaaacatgctaggaatccttgatgaaaataacattaactagcttgtttgttacataattcgtgtgcaatattgaaagcctaatgccatcttattgacaaaatgaatgaaaagctgaatcatgttgcagaatgctctgtttttgccaatctgactgaaataatcgattatactacgtattaatcgattaaattcattaaaaattacactcagtatgaaagttaagcttaagtaatcgattacgcttgtcttgtaatcgattatctttcaataagtcagaaatggtccctctctgagataatcgattacccatcgggataatcgattaccatgcttaaaactcaagttagaactgactgtgtcactgtaataatcgattaccgctacattgtaattgattactctcaagtttgaaaatatttgtctgtctgaaataattgattaccactcgggataatcgattacataagctctgatctatgactggactgctatcctgatgtatataatcgattaatgagtcatataatcgattacaagtcatcttcaacctcttgaaatcttaaatgtaatcgattaccttacggattaatcgattacatagtgtaaattttgtaatttgctgatctgaaataatcgattacttaagaatttaatcgattattcaagctgttatgtgatctctgacagtttttctgggtttatgtaactgccctatcctgtgcatttagcgtctaaatcatcattaacttgcattaactgtctataacagctatatttttgaaaaatctgaacatttggtgtataatccttgcctataaatagtgaccttgtgttcatctttctctttgcaccaaaaatctgttctctcttgctctcaattctgtgtctttccacccttccttgttttttcattgtcttgtacaacatgtctgcacctaaaagagttaggactggaaagcgtaaagtaggcgaatcctccaatactcaaccccaaccccaaccagaccgtttaagcctttggtttaccaaagaatctgacaagatgaattatctccaattcaaagccactaaacccataagctcacccaaatacataagccttgaatggtttattaaggaaggatttgtctttcctgcacttctagaaacccaaggtcttaaaaagtttgtggaaatgaagggtacttactaccctgatcttgtaagagtcttctacacttgtggaaaaggctctatggatgggtactttaaatccactgtgaaaggagttgaaatggttataacccttgaactatgggaaactattgctggggtaactaatgatagggagagaaaatttgaggaaacctgtggtggctacaacaaaataggtacttatagggaatcccttactgacccaaaccagcccattagaaacagattaagcactggtcctatgtcaccagtaaatcgactccttcactatctcattacctatgtcttgaccccaagggcaaccaaccatgcccaagctactgacgaggacctacaattgatgtatggtctcacaaattccattcctatgaactgagtaattattttcaaagaaataatgctgaaagccaagagacttgtcaactatcctttcccatatcctgttcttatctctaaattcatcgctcacttttagattgatgtttctaatgaagtggtggacaacaccaactcctccaacagccttattcaggaaaagcatcagtcaaagcttggtttacacaagactcctgatggttggatgatgggtggacagcatcaacaagagcctcagcaacaggagacctttgttgttgatagtgaagatcctttggctgattttgcgagtgaaggtgatacatctcaacagccccttcattctcagtttgaatcactaatgctagccaaaatggatgggcttctgcaaatgcatcatgagtttagagcagaaactcagggctcattcagggaaatcaatgccaggctagatgacattgaagccacccttaggatggatgattctgatgacttttagagtcttagttatttgtgtctttttactctatcttttttaagctttgctatgtactcattatcccactaatcaatgcaaatttatgtttctgcttactttaatccgctgtgccttgctatttttgtctttaaaaagccaaatgggggagaaaaattgaaattaagcaagctctgtacacacctctgtttgcctctgtttttatgcgtttttttaactaaaatttcaacagtatgacttgcaaaagttagggggagtaaatagctcaaattggttgcaataaataaatatatgttgtgaatggatgctaagttaaaaacagatgtctttaacacttgttcttgcaaaggaatttgaatttttcaggtgttgaaaaagctcagaaaaatggtatgaagacccttcatttaatcacaagacccaatgttattcaatttcaaatttggcatgtttaaatccaaaaagggggagattgttgatttgaaggggagttgcttgaagcacaaagaactttgaagtcaagaaaggattgttttggactttcaacatgtccttgaagcactgaaaaaaagcttgtgatcaaatgtaaaaggaaggaagttttctgatgatctaagtcattgcattcataccattcataagtttaagaattaaatcacaaagcattggtaaattgttttgactttttgaaataaactaagtatttttggaaaaatagcatttcactggtttaatcgattattataggaaaataatcgattattttgttcttgatgttttctggaaatttctcaagaacagtttaatcgattacactatcgaattaatcgattattttggcttagatgacacataatctgccttggtgacttttttaatcgattatcaccaagctataatcgattacatcagccaaaaagaaaatatcatatctctggtataatcgattaccaattattgtaatcgattacttagttcaaagcatatttttcatctctctggtttaattgattaccaattattgtaatcgattacatagttcaaacatatttttcatagtgccggatgtaatcgattacacgtcggaataatcgattaaattgctcgttatagatacccagaatcattatgaatggtttaatcgattacaggagcgtatgtaatcgattacaagtgctaaataatcgattacaggagcgcttttaatcgattacaggcggttacaaatatcactataaatagaacccatgctcagctgttttagaaacttgagtgattcatattcagagcattctaaagcattctaaactttcactaagtgatatttctgggttcaataagttcttgcttccataaaacttttatgggtctttaagggatgagtgaagcaagattttctcttttcaaaatttaaggaaagttctgttctgaatttgtaatctgcatacaacctggtaaaatcattcttatgcatttcattcttggattatcaggtgacctctttccttaatctttgatgttgtaattcctttttgaattttgtgttggtttgtctattgtaaatgagtttcttgcttgtaatctagagatagtgtttctctagggggtttgctgagtagtgttctcagtggggtttgtctctaagaatctaatagtgttttagatttctgaactttatctagggttgataaagagaggcttgtaataacttgtaagaactgaaatttacaatagtggaactctactctagtgttgagtagaagaaaactggatgtagcttcatagtgtttgaagtgaaccagtataattccttgtgtgtttatctaattctgcatatttgattgtcttttgtgaattcttgttaattacttgattcttgaagcatcacatctcttgggttgggttgatctttggataaaggttcttggttacaaaagtgataaagatccaaaagggaaaaactctgatttttatcaataaattttttaaattaccaagactaaccaattcacccccctcttggttaagtgtgaagtgttccatattttacaccatgttgttggatataagggaagttgcaagaagaatcaaaagcaagaatgaagaagaagcttgatgatttgcttgaagttgtttttgctttatcatgcccaatcaagtatgaagacatgtgcaatgtgtttaagtattgattcaagaacattgctttgtgatccttgcattgccattagcatgtctcattgaatttgcataaaaatgtgctattaaaatttagaagttacaaaatgatttcaaaggaaaactatttctcatggctttgttttttgaaaaatgaaatcttattgttttaatcgattacacagtagtttaattgattaaaatgttcttattcatatctggaaaagccatgaagaacactttaatagattacatgattgaggtaatcgattacatagtgtattttggaaagtgattttctgctttaatcgattaccatttctcgtaatcgattaataggctttttagaaaactttgcttttctgctttaatcgattacattgtgtaataatcgattaatctgttagtgatctgtttccagattactgaggaacaatttaatcgattatttagttactttaattgattacatatggaaaataatcaattacactatcgttttaatctattattgtcagttaattctgttttttaaaaggctttgtaagttttttctataaatatagaacttgttgaaaacaataggaatactcacaataactaagagagggggtgaattagtttgatcttagtatattaaaattttgttgataaaatcagagttaaaggatcttcatcacttttaaaccaagaaaacttttaatcaatcaaatcactcagctcaagaaaccaatagctcaaaatagaacttgttgagtaatgataatgatgccaagaacaaatgaaaaagataactgataaagataaaggaatagaaaaacaactcaagaatttatactggttcacttctcaacaaaaactacatccagtttcttctaatcaacactatattagagttccactattataaattccagttcttataagttttacaacaaattctctttatcaacactagataaagaatagaaatctaaaactctattagacttctaatgaacaaggaccagagaacactactctgttcttccctagagaacactactctagtccaagcttcaaagaacccttttacaatagcatcaaataacaaacattacaaaatgaattacaaccaaagataatggagagaaataacctgatgatccaatgaatataaatgcatatgagttaccaatcagagttgaatgcagaaaaaagaatttcagaacatgctctccattacttttttgaaatctctttcccaagaaatcattcaatacctatgaagattaaagagtgggacaagagctaagttaatccagaaaatcactttcagactcttagaaggcttgtgtatattcagaaaattcgaattattcaagtcaagtttcaagccaagcctcatttctatttataacagtttttgtaacaacctgtaattgattacacgtgccaaataatcgattaaaatgacttatgtaattgattaaattttcacttaatcgattaaatgttcaaggctccattatgggtttcacaacgaacaaaataatctgttaacccgagttgtaattgattaaatcagaaaagttttattttagaaacaacttgtgtaatcgattacattttatggtaatcaattaaagcagtgaagcaagctttttcaaatagcttatgtaatcgattacgaataacggtaatcgattaacacaagaatgcacaatgttcattttacactatgtaatcgattacaatagttgtgtaatcaattattatgttcatcaaagcttttcagtttcaaacacgaaccaaataatcgattaatccgttgtgtaatcgattaaaacagtggaattacatttttccaaaaacattactcaattaaatcctttttcaaattgtgagtagctttgatattttaatgaaaacatttaagcatgttaatgattatatgcatgcaatgcaaggatcaaaagattggcttctcctacacttcatttgaattacattcttcaaggcatgtgaaaaactcaaaacattcttctaagtcataggcttcattcttcttgttgctccccttatatccaacacttgtgcgaattattccatatctctgagtgacttacaaaagatattctaagctttctaaagtgtccaagaaactgattccatagtgattaatacatcttgtaaagatcaggatttctgaattttagaaaggatgtgctaaaggaaagaagatttcaagatattgattctgagctatagaattcagtctacctgcattatatggtaatctcatttcgtttttcattcattcatacatgatggatcacaggtagtgtttgtcttgaatcattctttttggttttactaagagtttttgttgtattgtatcttttcaaattaattccttgtaaagcattctagagaagggttctctaggtttgaagattcaagtaggtttctcaagatctttgtgacttgtattctaatagtgttttagaattcaggatctttgtctagtgttgatagagatagtcacttgttgtgcttgtacaagaataatttgaaatattgaaaactttaacctagtgttggttggaagacactggatgtagcttccatgtttgtgaggtgaaccagtataaattgttgtgtgattgtatctttatcagtatatctttcattactcttggttggaaatcaatagacaatcaataagagttatttcattcattacatgcagttcaagatcatattagattgaagtaaaaatctgtttttgattaagggtgattgtgtgatacgatccttgttttaattccgcaaatagttttcaagaaaagtttttaaagttggtattaaccaattcacccgccctcttggttatttgaagagtgttcatagtattttcacatgtatcatatgctttagtacaacctcatgcaactatggttcctcttcagtttttggtatttatgtcctcaccatgttatcatactcttgtggatctcttaatttgtgattatttcctaagatcagtagcatgtgtacataaggtagtccccgtttctgaaatcttgtcacatacatgcaaattttatccttcccaaggacacctttattaatgacatcattctttagttgctcaaattttcctcaaaagattcttgttagcaagttaggacaattgtggtgtttgatgagtggcaagttcagaggatattttattttaagaagtattacatgtcattgcaagaaaaatatcaggtttaccatcataaagaaaaatagtcatatcatcttcataaccttgtgtcaagtctcaacgactaccaataaatgatgatggtaatatcgttctttgtccgatatttttctacaatagcaaattgaacgtgtagatgttaattgatgtaattgattttttatataatcacaatgaaagtatgttgtataataattttaatataatagtaacttgcaatattttctcctacatgcaaagcatcttgtaggccttgataaacttcagcacgaatattatcctagtgatttcaaatccaccttaacctccttacttcaatcttgatgcagttgtctacaacaatttgttgtaaagtcaacctgcttataacaacgtggaatattcatttaaatgaatttataacgaacaaatttatcacttataatttcatattatattttttacaaatatattgttacaacatagtacaaaacaatgttgtttacctgaagcatatagctataatattcacaacatgagatattttgtacattatcattttttgtattgaggacaaccatatgtctgaaaaggcaacaataaaggttagagtaaattacactcacaccccctgtattttgctcaaatttcacctaatatccctcttttttcgcacattacttttacccccatctgttaacaccgttaactaacatcaattgaaatatgtgagcagacgaaatttcccttacattttaattataaaacccaaattatttcctcccaattagtttcagaatttagggttcacattccattcctcttcaccgtgagtactattcctcttcctcttgttggcgagttcttcttcagcgtctagggggtgcgagttccttttccactcacgacgttcatgtttcattcctcttcaccattctagagttcttcaccgttcctcttccagttcacgagttctccattgttcctcttccagtgcacgacgttcacgagcatcttcgtttgttttccttttcgatgttcacgagcacctctgtttctcttcttgttccacaatttctgttcatgctaggattctacttgtaagtgaccactggaccttgtatataggttactttttaagattattcatttaattttgattgtttattgttgcctatttctgaatgaggtttcaatggggactagtttgggaccacttatgatttttaaaatcatttttttattattgttgattaaaatagtgttgatgtttgggatcacaggaaacacaatggatgaacaaacaatcatttgtttattattgttgattaaaattatgttaatgtttgggaccacaggaatacaatggatgaactggaatacatgggtcttgaaccaggcaatgtgaatattttggtccactttacggaccaacggggcaaaccaagtgaaatatgcaatgttgatgctaataagtttggaatgttcgacgcacatcatgtgtgaacaacattgctaatgacttagacttgccacaatgtcacccttttattttgtggttttgttctactactaatggcaaaattcttccccttaagactgatcatgatgtgctgaaaatatttgctagaatcaaaatttagtttatattcatatgtatgttagtagaacaaaggatgagttttggaacctacctttgatagaaaatgtgaatgaacctttgagtgaaaatgtgaatgaacttgtgatttattttcttttcaatttcagcaaacacaaatacattcacaggtgctcgttgaatcctcaagcggaggagtgaacactatagaggatccatcgagactgacggggctcgaacccgctgcttcttataaaatggaaaaaacttagagctaaaaggaagacaagaacacatgatgcatgattggctattaatttgttttttggaaattattggatcacttttggatgtaaacatacttgtgaaggatcatacttttttgtaatgtgaaactaatatacacattgagaaaaagttgatatatagttgtgcaagggctttttttgggttttatatgacaaaattatgtaaaaaggtctatattgctacttttttggagcaacctttttatgaacttaatatgaaattgttacctttattattgttgttacctttattattggacaatgcacaaggtctatgtttgagattttagacacttcaaaatgtcagcagacaaaattttcaagagtattgtgattagttatattttcccagcaaatcaatgtgacacaaacaattaagaagaaactatttaaaaagaggttaagctagttatgaatcaatctattcgaactgtccaaccctttgtgtccttaatacacccagtttgaatttcaaccagtgttttgcgcaattttttggacaatatttctagtcctgttttttactcaattctgcattgtatacattattgataatttattagtataataataattagttgcaaggaattttcaagaacacaaggaaagataatggtccaataatcaaattcctgaatgaaaataacatttctcctacaatttactatttggcttattatcaatcttcatttaaagaaacatctcatgggtgactaaccaacaaaattgattttgaacttaaaatcaatgtgtcaaaacaatttaatattgtttgctggtttaaatagtcgtgtctttgttacatcatcaaggcaaatgaaatgtataattttccagatgaaattggacaagtgataaataaattcaactgaaatactcaatcttttaagttcaaacattatgatgtaccttgcagctcttgattgagcattatatcgaagaccttgccataaaaaaaatatttcaaagaaaggagttaaaaacacaaatgcaggagcaaaacactaaaaattgaagcaaaggaccatattcaatcagagaaaaaaattgaactaaaaaattgaagaaggagaagaaagaagggtgttaacactgcgtaccaacaaggtgggttcacgtccaacaaaaagttgggttcacctccaattacaggaaaaaaacaaaaagaaacaagagtcttaaaatattttctagtttagaggaagaaaatgaaggtattttagacataaaatttcattaaaagtcatgtgaccagtattcccccaaattcttttaaaaagggaggagtatcgggtgaaatttgagcaaaacacagggggtgcgagtgtaatttactctaaaggttattgtaaatgatcatagtaaaaataataagaatacttcacaacaaccaagagggggggtgaattggttgaatcttgatattttaaaatcaaattcaaatcagagttttaggatcattatcacttttaaaaccaagaaacattttactcaattaaatagctcaatccaagaattcaaaagatcaaaacaaaagttgttgaacaatgaatatgattcaaagaattaaagacaatgaatatgatgagaatagagatatagaaataagaacacaagcaatttatactggttcacttcaaatcatgaagctacatccagtttcttctaattcacactgaattagagttccactattataaaatattcttacaagcttttacaagaacctcccatttatcaaccctagataaagaacagaaatccaaaaccctattagacttctaaggagaaagatccagagaacactactctgatctttaagctagagaacccttctctagtcccaagctttaagaaatcaattacaatagccaaaaacaacacaatttgtaaacaaaattacaatcactgagttaaggaaagaaacaacctgatggtccagtgaatgagatgtacatgaatgaacaattcaggttgaaagacaaaattaatctcagaacatcttcttccttaacctttgaaagagacttcttgctttaaagaatcactcaaaaacccatgaatgatttagtgtaagcaagaactcatagaacccagaaaaatcacttagaacgtgtttagaaagcttgtgtgttctcagaatacgaattgatcaagttacaaaacaagctgagccaaggttcttattcgattaaacgcgccatataatcgattatttcactcatgtaatcgattaaatcaaggtggtaatcaattaaagtgttcaacataatttctggacatgagcaacaaacaaaataatcgattattcagtcttgtaatcgattaagacaggaagcttcataatatcaaaatacactatgtaatcgattacagattctggtaatcgattaaaccaagaagctttataaaacaaaatgtactatgtaatgattactatatttgggtaatcgattaatgtggcaaatcatatgtgcatttacatattgtgtaatcgattactgaatttggtaatcgattaagacaggaagatggctttttcaacgttagcctgtgtaatcgattactgttccttggtaatcgattcttccagcactgcttgaaatcatgtatagcaatgtaatcgattactacctattggtaatcgattaaagtgttcatcaaggcagtgtatgtgaaaacaaaggtcaaataatcgattatttcgataggtaatcgattacattgttcttgaaaaatttttcagaatgaactaagaacaaaataatcgattatatccttaatgtaatcgattaagtcagtacaaaaatcatttttcgaaaaacctttgattcaaattaaaaccttagttgtttgttcaaagcttagtttgattttcatgaaaaatacttagttaaatcaatgaatgaatgaatgaatgcatggatcaatcagattgctttccttttacataaaattccaagtcttcaagcatgtttgaagctcaaaaccaatcttgtatcaaagacttccaatcttcatgaagctccccctggattcaacacatagtatcccacaatctcttgaatctttattaaattttcatcgtgtctttccacgttgatatccctacgacttgtcattgattttgcatctccatcaataataacattgggagttgatattgtggctgattagcaagatgctctttaatgagtaagttacattcttgaacatctagacgtagtgcaagttgtctaaatacacatacaaaaggattgtatcgatggagtatttgtttcaacatataaaccatagtttggtgaagttgagggttttccaacattctattttgtaactcgtgctttgtatcatagatatacagttgctagaaacatggcctagaaacctctttggataaaatcctcctatgttgtgataaattgccccttgataccaaaaagtatgtatacaacgtccagttccgagaatgctttcatcaacatgaacaccaagcaaagcaaataaaaagtacatgattgtaacttctaatatgttgcctaaaatgtcttccttctaatgaagtgtctaaaaatatttgaagcaactaacacatataacatgattcatgataaaacaggcatgctgtaaaatataggaacacttcacacttaaccaagaggggggtgaattggttaggtttggtaaattaaaaaaatttcttagacaaaatcagagtttccctttaggatctttatcacttttgaaaccaaaaatcctattgaatgctcagcctaaggtatccaatagctcaaaatcaaattgataaacaaagcaatacaatcaagatggaaagaatataatcaagatagagataagaatcaaaacacaaaagatttatactggttcacttcaaacactatgaagctacatccagttttcttccactcaacactagaatggagtttcactattataaaagtattcttacaagcttttacaagaacctctcctttatcaaccctagataaagaactgaaatctaaaaccctattagacttctaaggagaaagatccagagaacactactctgatctttaatagagaacccttctctagtgccaagctttaagaatcaaaattacaatagccaattcaatacaaattcagaaaagaattacaaccactgagttaaggaaagaaaacacctgatgattcagtgaatgatatgcacatgaatgaatataccaggttgaataatgaaaacaaactcaggacatctccttccttaacctttgaaaagaatcttcttgcttcaagaatcacttaaaaacccataagtgttttggtggaagcaagaactcatagaacccagaaaaatcactaagaatgtgtttagaaagcttatgtaggctcagaatacgaattgatcaagttaccaaacaagttgagccaaggttctatttataacaaacttttgtaactgtcagtaatcgattaaacgcgtccaataatcgattatttcacttatgtaatcgattaaattaaccttgtattcgattaaagtgttctacagaaatctggatatgagcaacgaacaaaataatcgattatttcgtcttgtaattgattaagacaggaagcttcataaactagaaatacacagtgtaatcgattacggattctggtaatcaattaaaccaggaagcttcagaaatcatattgaactatgtaatcgattactttatttggtaattgattaatgcagcaaaacatgttaaacacagacatatgatgtaatcgattactaactttgataatcgattaagacaggaagatggttttttctatttagcctatgtaatcgattacaacctgttagtaatcgattaaaatgttcatcaaggcagtttatatgtaaaccaaggtaaaataatcgattaatccgatacgtaatcgattacattattcttgaaaagttttccagaatgaactaagaacaaaataatcgattattactttaatgtaatcgattaaatcagtagaaaacttatttttccaaaaacctttgatttaattcaaatacttaatcaatttatcaaagccttgtgaattctattactcaaactaattgacttaatgaatgatgtgaatgcaatgcacttggatcaccaaaaatgcttcttccttttacatttaatcacaaattaatcttcaaggctttaaggcatgttgaaagttcaaaaccaaagcttgatccttgttccattcttcaaataactcctttgaaaccaacacgtgcgtgtaaatgtctacatatacttggggtagacaattgaaatttgaccattcttacattatttcaaaaattttgagtgtaacaccccgtgtgcaaccggcgcattaacattattacaatatcagagtaacgcagcaagcatggaaaaacaataaaggaagcctgaatcccatataaatacacattatatacatatatggtgaatctctgacctttacaagatacatagttctcaaagctatacaaatttccctaggtatcaaaatacagacaaaataaacaaaatgtgagctaacaagctcggtcttctaagcctaggggtctctaccaccctatcccagctcaggcctttttgccttgggatctctcagtgacttctgtctcagttcctgcaacatgagccccaaacaggggtgagataatcatcccagtaaattcagggttctcggaggtttccctccccctggttcacttccccaacaaatcaatatatatatatatatatatatatatatatatatatatatatatatatatatatatnnnnnnnnnnnnnnnnnnnnnnnnnnnnnnnnnnnnnnnnnnnnnnnnnnnnnnnnnnnnnnnnnnnnnnnnnnnnnnnnnnnnnnnnnnnnnnnnnnnnnnnnnnnnnnnnnnnnnnnnnnnnnnnnnnnnnnnnnnnnnnnnnnnnnnnnnnnnnnnnnnnnnnnnnnnnnnnnnnnnnnnnnnnnnnnnnnnnnnnnnnnnnnnnnnnnnnnnnnnnnnnnnnnnnnnnnnnnnnnnnnnnnnnnnnnnnnnnnnnnnnnnnnnnnnnnnnnnnnnnnnnnnnnnnnnnnnnnnnnnnnnnnnnnnnnnnnnnnnnnnnnnnnnnnnnnnnnnnnnnnnnnnnnnnnnnnnnnnnnnnnnnnnnnnnnnnnnnnnnnnnnnnnnnnnnnnnnnnnnnnnnnnnnnnnnnnnnnnnnnnnnnnnnnnnnnnnnnnnnnnnnnnnnnnnnnnnaggacttttacctgagtacctgaataggatcatctactgaaaggcacatctattcaggactccctcaacccatgcctgaggaagatcatccacttaagggcacattccctcaggacttgccgcccaatacctgaataggatcatctacttaaaggcacatctattcagggtttacatggacgcctatggattatcccaagggagatcatccacttaagggcacattcccaaggggtccatagttcctctgtaaggaccctagctgtggcgcggttggcgccagattccgcgcggatggctcggggatcttcagcagaaaaccctgtatagggtgtggcgcggatggcgctagggctggcgcgggtcgcgccagaccctctggaacttcacgcctggggcgtgagagttggcgctgggggcgccaattggggtttggagtgtggcgcggatcgcgcgggtcgcgttttgaggagaagaaaagtggttttcttcttcctctggacttcagcagccatgggagagctccccaagctcccatggccatcttttgtgatccctaaacactccagaacccagtaaacctccaagaaaccgagtgagagtgagaatccttcctccctattcactaaaaccccagagaactcttcctctgagagaggctgcagagaactcgagattgggcgaggaacggcggtggttcagcatcaccaaggctagggagagtggcctagaggccttcctcaacaattttgaggtaagaaactcgagtttctccgattgattttggatttgggggtgttgggtgaatagtgacccatctgtgatagggctagaattagctctgggtccagttgagagaagtgcttagaatgatgtaaggatggaggattagctttcaatttgtgatttggagactgttggttttggctctaggtgaggcatgtgtgacttggactgagtcacttgatctgagatatgccagagcctttgtgatgggcttgaggtccctgataggccatggagacggtgtctggtgagatagaccgtccaagccctgagaaacccagaggatttgggttgttagagcttttagctctctgtggatggcttgtggatgagtctgaagggactttgaggccatggatgatctgagatagaccactgagggtctatggtaaggcttgtgatggacgagcctgatgaactttagagtagatgctcaggttgatgggaaggactgtggttcctttcccaaaggcagtggatgtctgcttgatgagcttgtgcatgtttatatgcttgaatggtctgtaatgtgtgcttgtatgccttggtagggctggacaccgagggtgtcagaggagcagaccatcagtggaggctagagctgtgaggcatggctagccaggtaagctcatcgctctggggactattccctttctcttgtttgccacccaagtaaggggtgatgaatgcatgatgtgcttgatatatatatatatatatatatatatatgtgtgtgctggaagccagaagggctgataacggtccttagagtgaagctcaggccgttttagaaatatgattatatgatgaaccctaggtcagacaccgagacagtgtgaggtgtttagtgattctgatgagatgcagaccatgaggtggtctgtgatggaacctataggataccggactggtatcgggctagctgaggttccctagccagagaaagagtttgaggactccctggaatagctgagattccttgggaggtgccattgctctccagtaaagtcctaagggtggattgccctatatggaggttcctccttaggcagagatattgagaatcctgagtggttatctcaggtatgcgattaagtcctggatggtttcccaggccagtgtatgtgaaagtcctggatggttcccaggccagtgtatgtgaaagtcctggatgatttcccaggccattgctgtggagtcctgagagattgagtgcctccgttgtgagatgatctctctcaggtagtggattgacagtctgagggattgagtgtctccgttgtgaaatgatctctctcagaccgtgtctggaagtcctaggggattgagtgcctccgttgtgagatgatctctcccaggcactggaaagtcctgagagattgagtgcctcctgtgtgagatgatctctctcaggcatgagatgtgaagccctgaggggttgagtgcctctggtgtgagatgatccctctcaggcattggattggaaagtcctgagagattgagtgcctcctgtgtgagatgatctctctcaggcatgtgttgtggaaagtcctggaggtgattgcccatttatggatgttcttgcccaggcatgtgtcatggaagtcctagagagaccaggcagtagatagatatgttgtatctttaagagagggcttcccgaggggatgatagcctaaggcctcttagatgagccatatccggattcttgaagtcctgagttgagagattcctcaggcaatgtgcttgaagtcctgagttgagagaatcctcaggcaatgtgtgtgtgaagtcctgagtaggtgactcaggcaatgctggttcagtgatgaggcggtgcctctctgatataagatgtgtcctggggcagacactatggtaatgtacctctgtgagacgagtctggggatggcttgagagccaggatgaggtgagagacctctgatgctgatggcatccagtgattgtgcccagatagctgggatgggtgaaagctaggacgatgtcctagactttgtatgtgtgagctaggatgatatccttagctctgatatctgtttatgtgtttgtgcttggaggtgaaccagggtaagggaagattcccagaaccctgagcttactgagacgtttgtctcaccctgtgtggggtttgtggtttttcaggtgcttctagaggagaggagcaaccacagggcaggaggccctagctgagagtgctggagtggtcatgggctgcagttgaagattagaagaatctttatttgatctctgtctagtttactgtataggtatagggtgtgagtgtacacccgttgttctgtacatatttgtgatgtatgaccagatgtggtcttgttttgagcatgtatgtgtacagatgataatgttattgtatttgagttatatttccctcctgatatcccttgtttgatttctatgttatatctgcctgtggttgtatgtttctgtttaactggatcaatggggcttatgtatgatattatatggtgtgttttatattctatgcataatgaaatcaagaaaaacgattctttcgcttccgcaccgcgattagataacgcttatagcgtgatactgatattattgatgataacgcaccgggtgcacacggggtgttacatcctcattctactggccagtaaaatcatcatgcatgcacctcacacagcatcaacatcacaatcaaaatccaacacaagcatacgttatgctaaggtaatcaatacacacataccctatctcagggtctatctagcactcaactgccagcatgccatcacaacataacatcagcttttgatacatatttcagtattacagcatcatacaacataagcatgcaagacatatcaatcaatcacccgatttgggtggagtgaaacacaagcaggggaaacattccccaagaacactaagcttacctggtcccagctcagaatcagctctcctagtctcgtggtgatccctaccagcaatatgtgtctcacgtcctacaataggcatgaaatagacaatcagatacggtgttcaatcgtttatatggaaggaaacacccttcctttcataatcagtctctatcttctaacttaaggtttatcttagcccagttcctactaggccatgcattgaccctcaagggtctgcctcagtctaactaaggcctcatagttcctttaaaattctgtaccactcaattcaaagctttattagtatcaagaaccaacaatggttcaactcagccaaagccaatatatataaacatgtttccaccgttcatttggccttatgaacaacttttgtaaaggtacttaagttaatacaggccatagtacctctcattcacacacacttcttccttcccatagccaaactcaaacttcatcacaaatccagtttcaaggttccataactctcagaacaccctcctgattattcttttctaaagaacctaagcctaattccagtcctatcatcaattggttactattcatccattctcccattccacaaatcaaacggttaaaacatgagtttcttaccttagatcaatagaggaaggctggagaagtttttctcctaactctggcgtccttgggccagcttcctttctcctccaaagctcagctctctctcaagaaactcaaggaatgggtttctctccaactaggctgaaatttggcttctatttggttctaattaaggttagaggtgattagggggtgtttatatggtttataatgaaggtatgaagctcttagagtgcatcaatggctgcctgggctcaaggaagaagatgaataatgttttggccttgaaaaacacgtgaatggcccttttatactggtcctgaccgacatgccgcgcccttggcgccactttggcgctcctggcgccaatttccggcatctgtggcgctcctggcgccatttttcagcatctgtggcgctcctgactccattttccagcatctgtggcgctcctggcgccagactccgtcgctaaatccgtcgctaattctgtcgctaaatccgttactaaggcttttgcgacagaattttataaatttaaatttttatttcttttactcctttttataaaaagcctaggttattatattgagcactattataagtgtgtcggaatcaacactgtaactctatattattaaaaaaagttacactttatttaaattagaacaaatttaacagatttcctatgttacataggatttgtaaaacattttgaatttatttacattgatatggactaatatttcttattgtcacttatagtattttaaatttaagaagaataaataatataataatgtttagctaatatgactaaaatgatctaaaacaatattaaaactaaaattgctaacaagcacgaacatcaatgcttgattttttgttatattagcatacatgcaactttgttgatattttagagagtgtgttataacaattggaatgatgatgtaataatagaaataacgtagaataacataaaagataatcatgattccttgatcgttagcagcgtttgtagtatgatcagttaacatgtttatgttcataatatctaagttgcttttttgttgaaaaatacatacacttaatatgtgtaagtgaacataaatgtattggagtatttcaaagtttgtgataaaagtattgtactgacatgtgtcatttgcatgcctattacttggtcctgattcatggtcattgtttccctaaaacctccttgatttgaaacatgtatgttcaaataagaaaacaataaataatatatatatatatatatatacactattaataaatggaatannnnnnnnnnnnnngtgtccacaaattttagaccattttaccatttatcagtttttacacttctactcctatctcttaataacttttcactactatgatattgttaattattttttaaaaaaaattctaaatatttttttttgttttttcttatttaaaatatataaagaggtaggaatgtctctctcatcctagtatataataaaaatattgtactaacatggtggaatgtcattgacattcctattacttggccttgtttcatggtcattgttttcttgaaacctccttgattcaaaacctatatgttccnnnnnnnnnnnnnnnnnnnnnnnnnnnnnnnnnnnnnnnnnnnnnnnnnnnnnnnnnnnnnnnnnnnnnnnnnnnnnnnnnnnnnnnnnnnnnnnnnnnntagtatataataaaaatattgtactaacatggtggaatgtcattgacattcctattacttggtcttgtttcatggtcattcttttcctgaaacctccttgattcaaaacctatatgttctaattaaataaaccaaaaattactattaataaaaaaaaataaataatatatatacttactattaataaatgatgtaatgttaataaaaaggaatacctctttttggtgcctacaaattttatacaattttatcctttattagtttttaaatttctactactctctcctaacataataactttccactaatttgatgttagctaatttcttaaaacttttattttttattttttattttttatttaaaatatgttaagactaaaatacaaatattgtattaacctagtggaatatcaccgacgtttctattacttggccttgcttcatccatattattccctgaaatttaattgattcagaattacaacctacatgttaagtaaataaagaactattaatagccaaaataaaaaacttaacgtcattatttttgttatgtctaatttattatattgttttatagtattattttcaataaacaataattatattatttttcatgtacacatttttttctatgtttttgcccctgaaatattctgcaaccacctattgcaattgcaatatatgtataaattaaaggatgaaataggaaatgaaattattaaatgggaaaaaagaacgtgtacacaaaaagtaattgatgagaaaataattgctcactctcttcgtgctcacagttttttcatcccacaaattgacacaattgttcaattttcttttcattcgaccacttgactatagaatataaaaaaacctcctcacttctctatacactcatctcctttaagtttttcattcatagcagtgtggtcacatgttgatagtggtggtagcaattcgaaaggaggggaacccccgagtgcactggtgtaaggttgattttgttctacggtcgcaatacgcatgaagggaattttgcgacttaagaaactccttcatccactggaaatcttgaacataagagcatcgtaaggtttatccccttaaactctaggccaccaatgacgtttgtgtcaaattcaagctgtggtatgtttatctctattttatttcatgatattttgaaattgttgtggtatgtttgtctgtgagaaaattatttatttgtattggtagtatattgtgtttaaaatgtaagatttatcattgtggctcatttaaataaatgttattggatttaatgaaaagcttctaccataaaagaagatacaagaactgaaagggtcaagactttgagaaaacattctaccataaaagatcttccacaatcatggacaaatgtatgtttatgtgaaactcatgaattctaaagatcctgttcatgaaatttgatgtgattgttttaaacataaattatagatttgtgtttacataaaatacagcctgcaatatgtgatttatatttagtagggtcgtgcattttatgctacatccctttccaccttattttttaatgttaaatcaagatacttgtagatcattttgccaaatgaagtttccttttctcacttttgttaatgaactctttgattttgtcccttttcactattggacaattaggattttatgttttttctcttattttgtccctttttattcttgatagagtgcttttagttgaatatttttctatctttcttagcttatttgacctctcttggacctttattttcatattctaattcagttttgggcctaggcaagtaagtgggcttaattgctaattgttgcgtattttcggatttttgctcacttgacatatctggcttgtgcagggcctatagagtgctaccgatctccgaatggagcgttaaaggagaccctggaaagataaagaaaatatctacaagttttctagaaatagaccgaggccaattctatcatttagagggtcattttaagcttcgaagttagcacctctgcacttgtaattttgggctacgaatttgactttcatggttgtaaatagcaaataattagattgttgggtttgtttatggcccattctattttcagaacttagtcactaatatatcagtgactttagtgaaacttgggcagcacactttacgattcaataaacaagttttacatttcttttctttagtttttagaatcaaaagcttgttcttcattttctctcaattgttcttcattgttcttcatcttcttnnnnnnnnnnnnnnnnnnnnnnnnnnnnnnnnnnnnnnnnnnnnnnnnnnnnnnnnnnnnnnnnnnnnnnnnnnnnnnnnnnnnnnnnnnnnnnnnnnnnnnnnnnnnnnnnnnnnnnnnnnnnnnnnnnnnnnnnnnnnnnnnnnnnnnnnnnnnnnnnnnnnnnnnnnnnnnnnnnnnnnnnnnnnnnnnnnnnnnnnnnnnnnnnnnnnnnnnnnnnnnnnnnnnnnnnnnnnnnnnnnnnnnnnnnnnnnnnnnnnnnnnnnnnnnnnnnnnnnnnnnnnnnnnnnnnnnnnnnnnnnnnnnnnnnnnnnnnnnnnnnnnnnnnnnnnnnnnnnnnnnnnnnnnnnnnnnnnnnnnnnnnnnnnnnnnnnnnnnnnntggattcatgttctaatttcaaatgataatcacaaggttaattgaatgatagttcagttagggttgtggttgtagtttcaattaatttaggagtagaatcgattgaactgcttctattgagattgaatgaatgttcatgttaaaatcaacttatgggaatgatgatgattcaaatagcttgggttggtgaattggattgatgctttctcatctgttttaccttactctttgataatcttgttaatttttgcattgttctttaattttagtttgtgttcttgcatgttttactttacgcataccaactgtttgacaaaatccgcccttattattaccaatgaattgaagctaaaaccatattgatcgtgtctctgagtcgacctaggttagctctgtgctacagaattagcttagtaaaattgtttttgatgcgtcacgacaaagcaatatcaaaactggcgtcgttgccggggatgcggttcattgtgtgctagctttaattcattgcaattagttcatagaagtagttataattcttgcatttttacgttttgttgcacaaatatacttgttacatgattatgtgcttgtagttgatgcattagctttgtatttgctcataaaaatagagaaaaacccataaaaacagaggaaaacccaaaaaaacagagcagaacgcccagttggcgctaccagcgtgaccatccacgctgatcgcgcccagaattcgaacccagaatctctggttgaagtcctggcgctgatcgcgcggctctcgtgctagtcgcgccacaggttcggctatttgatgctgatcgcgccagacccggcgctattcgcaccgtaggttccgccatcccacgccgatcgcgcgaacttcccgaacatcccatgccggtagcgccagccccatgctaatagcgccagcgtaaaaaaaaaaaaaaaagagtctggaattttaaaaatttagtttttgtataaactttttaggattgtttttgtgctttttattatcctttatgagttgtattgtgtatgattaggtccacatcaagtgaattccattcatttgatcctgagatagataggacatttcatagattatatagtcaaaaccttaggttagatgactttgatagtgtagttttagacaatagcatagtgtcttctgattttgatcctgaatctaattctactccttctacttctacacatcttgatatcatggctgaaaacaacctaactcttaaggatttagctacacctgatgttgttcaatatcctgaaactgaggtcagttatgagctgaaatctggcctgatccacataaacaccttaaggagtttcatgtggtgtatccaccatgcgatcccatgacgttcatgaggattatgtcaagatgaaagcatttcctttctctttggatggtgttgnnnnnnnnnnnnnnnnnnnnnnnnnnnnnnnnnnnnnnnnnnnnnnnnnnnnnnnnnnnnnnnnnnnnnnnnnnnnnnnnnnnnnnnnnnnnnnnnnnnnnnnnnnnnnnnnnnnngaaattcttccctgcctctagaacagcatccattcggaaggaaatttgtggcataaggcagttccctggagagtctttgtatgaatattgggagagattcaacaagttgtgtgctacctgtcctcaccatcaaatcagtgagcaattactgattcagtatttttatgaaggattaatgttgatggataggagtatgatagatgcagctagtggaggcgctctgatggacaagacccctcttgctgcaaggcagctgatttctaacatggcagccaactatcaacaatttggtgctagagttacaacatctaagatgatggcagcaaatgaagcttctgtctctatggttgctgataaccagagaatggagaacaaattgacagagttgacatcccttgtgaggcagcttgctattgggcaacaacagaatgcgatggcagtcaatcaaccaaggctctgtggtatctgttatgcgcctgatcatcccacagatgcatgccccactctccaagagacagaacagcctgctgaagtttctgccatgcaacctggccagtcatttagacctcaacagcaatataatccttactccaacacttataatcttggttggagagatcatccaaatttgaggtatggtcctggcccacaacaacagcaaccctttagacctccacagtaatccttccagcctgccaccaccaaataccaacctcctccttttagacaacagtctcagttccaacaacctgcacctacacctacaccacctgtgcaggtcagttctggaccttccttggaggacttgatgaaggaaatggccatcagcaatatccagtttcaacaaaatgtcagtgccaccatccaggacttgcagactcaaattggacagttagctacaactgtcaaccagatgcagcagcaaggttctggtaaccttccagcacaaccagttgttaatccaaagaatgtgagtgctattaccttgaggagtggcacgaaacttccagatgctggtcctaaaattgatactggtgctggtaaaaaagttgatgatggtgccaaaatagattctgcaccaaaacagattcccttaccttttccttctaaagccattcctacaaagaaagtagtggagcttgattctgatctgcttgagacattcaggagggtggaagtcaatattcccctcttggatgccatcaaacagattccaaaatatgcaaagttcttgaaggacttgtgcacccacaagaggaggcttaagggaaatgagcaagtgaagatgggcagaaatgtttccgcattgatacagggtaaagctgttgatgccaccgaagtgcaaggatcctggcactttctctgtcccatgcaccattggagatattacttttgtagatgccttgtgtgatcttggagcctccattaatgtcatgcccacatcagtttacagagcactacaccttggtgagatgaaacccactggtattgtcatccacttagccaacatgagtgctgcaattccacttggacttattgaagatgtgctggtgcgagtatataatctgatcttcccagcagatttttacattttggatatggagaatgagtcttccagccatgggcccacattgatcctagggagaccattcttgatgacagcaaggaccaaaattgatgtgcatgcaggaactatttctatggagtttggtgatgacattgtccaattcaacatttttgaggctatgagacatcctgcagaggagcattctgtttttctccttgatatcattgatgctgcagtagatagtgtagatatttttgatttactttctgatttttctgatctttcttctgacttttctgactatgatcttggttcttgtaattgtacctgtgatgattctgctgctgtgtgtagcatttgtgcgaaaatttcctccgcacttcactctgatggtgttccaggtacagatacaagttttgagcctactatcacactttcctcagtttctagtcttcccttaccctccactattcatcccccttccttggagctgaagtcactacctgagcacctcaagtatgcatatttagatgatgctcagaagcttccagttatcatatctagtagtctgccattggagcatgaagagaagttgatgcatgtcttgagaggccacaaaaaggtcattggatggacacttgctgatcttcctggaattaatccttccatctgcatgcatcggatacttttggagaatgattctagaccagtgaggcaaccccagaggaggctgaatcccactattcttgatgtggtgaagaaggaagtgacgaagctactagctgcagggatcatctatcccatctctgatagcacttgggtttcacctgtccaagtggttcctaagaagtcgggtctcacagttgtgaagaatcaagataatgagctgattccgactagagtggccaatagttggcgagtttgcattgattacaggagactcaatcaggccactcgcnnnnnnnnnntaccgcacacctttggggatgtctccctatcgggtggttttcggtaaggcatgccaccttccaatggagattgagcaccgtgcttattgggcggtaaagagttgtaacatggcatttgatgaagcgggtatgcaaaggaaacttcagttgcaagagcttgaggagattcgtttagaagcctatgagaactccaagatttacaaggagagagtgaataaattccatgactctaggattcttagaaaggagttccatagtggccaaaaagtgttattgtttaattctcgccttaagcttattttcggtaaacttcgatctagatgggatggaccttttgttattactaatgtttttccccatggtgcagttgagattaaaaatgaagctaccgacaaagtcttcaaggtcaatggtcaccaactcaaagcatttcatgagagccctcaagtggaggaagagcttgtgaaggacatctctttggttctgccaattttgtgtgaagatgtgtcttgaatgacatttggggagtttccttttcccttcttttatttgttgtctctttattgcatttctttgcatgcttacattgaggacaatgtgcatttcaagtggggggtgaaggatcctaaaatttttgaaactatagttattttctgttttctgtttgctgtctgttttctattcatctgtctgtctatttgtcagtatctgttattttctgttttctgtttatctgtttgtctgtgttctgtttgtctattttagtttttgagcctgtatatttttattgtctgtttctgtctgtttctgtttgttgctgtttgttgctgtttttannnnnnnnnnatttaagatgagccatgtgtggtagaattatgccttgtgagttttcgagcctttgtgaatatgttctttcatgtgtgatttcacccttgtgctagattactctatgttttgccttgcctcttttgacattccttgttgcacatgctttgattgagatgatttaggccttctttcttttagctactagccaaataaacctatccttgtgttgatatccattgtcaccctctttgagcctttagccttttctttcttgtttagctcattaaaaactataaaaatgatggaaaaccatgttaccctaactttagggagaaaaggggctttggaattgttttgggagtgggtttcaaacaagtgtggggtgtttgtttttcgttttgttttgaaagaaaagaaaagaaaaagagaaaagaaagagttcaaatagcaaaagttcaaagaaaaaaaagaataagaagaaaagtagaaaaagattgtgtataagcaaagaaaaagaagttctagcaaagaaaaaaaatgcaataaaagttgttatagttcattttcatccttgtaaattcttctaatttcatcttcttgcttctacccttcttttatcttgttggcttgctccccattgcccctcttttctcttaagctttagcctaaatatccttttcttatccaccttttcctaagccattcattacaagctaataaaatccttttgatcttttgatgcatgtgtatttcaagttgaatgaatgagaggtttgtcaatgcttggatgtgctagttgcatgtggtgtttgagtgtaaatacaagccatacacatcatgtgagattgagtgccaccctttgagagaattctatcaccatgttgcattcttgattctaaatttgactactatttcactttgcactttgtgatcatgttttcatggattgtttgttacctcaacattattcttccatctttcatctctctcacttttgtgcattgttatgatccattgaaaaatatgtgtgccttgttcatacccgttctttaaatttttggtttactttagtttaaatttttctcttagtctttcttttagttttgcccaggagtgcaaaagtttaagtgtggggtattttgatagagtgcttttagttgaatatttttctatccttcttagcttatttgacctctcttggacctttattttcatattctaattcagttttgggcctaggcaagtaagtgggcttaattgctaattgttgcgtatttttggatttttgctcacttgacatatctggcttgtgcagggcctatagagtgctaccgatctccgaatggagcgttcaaggagaccctggaaagataaagaaaatatctacaagttttctagaaatagaccgaggccaattctgttatttagagggtcattttaagcttcgaagttagcacctctgcacttgtaattttgggctgcgaatttgactttcatggttgtaaatagcaaataattagattgttgggtttgtttatggcccattctattttcagaacttagtcactaatatatcagtgactttagtgaaacttgggcagcacactttacgattcaataaacaagttttacatttcttttctttagtttttagaatcaaaagcttgttcttcatnnnnnnnnnnnnnnnnnnnnnnnnnnnnnnnnnnnnnnnnnnnnnnnnnnnnnnnnnnnnnnnnnnnnnnnnnnnnnnnnnnnnnnnnnnnnnnnnnnnnnnnnnnnnnnnnnnnnnnnnnnnnnnnnnnnnnnnnnnnnnnnnnnnnnnngagtagaatcgattgaactgcttctattgagattgaatgaatgttcatgttaaaatcaacttatgggaatgatgatgattcaaatatcttgggttggtgaattggattgatgctttctcatctgttttaccttactctttgataatcttgttaatttttgcattgttctttaattttagtttgtgttcttgcatgttttactttacgcataccaactgtttgacaaaatccgcccttattattaccaatgaattgaagctagaaccatattgatcgtgtctctgagtcgacctaggttagctctgtgctacagaattagcttagtaaaattgtttttgatgcgtctcaacaaagtaatatcaattctctcagtcaagacttgtgaaacaaagatcagttaccaaatgaaaaacaagtttttttgtgcattctattggttttcttccgaggtttaaaagctaaccatgattcatttattcactatactggaggaatggaaagtaaaatcgagaaagctttttacttataaatatgcttacacaccaaatgacaaatctgttctttttagttggactctcttatttagtttttaccattaagcaagcatcatgcatattttcatttttcaagtcatccaatgttatgtttttcaacatttgcacaacttgggtaatagaaacggaatttaaactcccttaaagggtatggtcctttttcttaactatcaatagaaatttttcatacccagaaaaaggttattacttattagcctctctgacatgattggaaaataagaaagaaaaaaatgataaagattcaaagagagaagagagagaagtgtaagtgtgataggtgattttgatagaaagataaagatagagagaaaataagagtatcaaacatgtgtttatgacatatgggtcgttataataatgagagtgacatctttgttttttattcccaaggttcctcatacaaattattgttctgtgaaatatctcctccctcaaataaaaatcctccttttttatttcaacaaataaattgagatttatagataggtaaaccctagtggaagggtatacgttttgatgtatcaaaccctacattgtctaacatagttgcttttggtttgtctctctgttggggaaaaattcatcttcaaagtcacaggtgttttgttcatcaattttcatatttgttttatgtatcagtgaggtacccattttggagcatggtcgggtatggcttttattgcatgaagcagttttgttttggtgggataatgattttgtttttatgcttagcgggatgatgtgtatcgtgatatctttttatatcgtgataccatggaagttattttcttgatgtgacaattaatgaaaaggtatcgataaaaaaagaaagacttacatatggtgttcatagatcttgagaaaacatacgatagggtcctaagaaaagttttatgatggagttttgagaagaaaaagatatcattatagtatgtaaatgcaatcaaggatatgtatgatggggctaccacatgtgtgaaaacttgtaatggaacatcaagttattttcctatcatggtaggtgtacaccaaggtgcgactcgtagtccttatctctttgccttagtgatggatgaactaacaaaagatattcaagagaaagtgtcatggtgtatcctttttgtcgattatattgtgcttactgatgagaccaaagacggtgttaataggaaacttgaattgtggagaagcactctggagtctaaaggattcatgttaagccagagaaggactaagtatattaaatgtgagttttcactgtaagagatggtaattgtaacatcccgtatacatccgatttgttaacattcaattatggtcattaagcgcagcaattaattaaaagccaattaatttggaagcaattaacaaaatgacgtcatcaaacgtcttcaacaacaccaactttgcattatgtatggtaaacattcaacccatatattaatatgtctcaagatataccacaatgtacatcctctatatctaccctttcgggtacaaaacatataaatatacatacaaaacaatgagccaacatgctctcaaaataatttgcctaaggttcaaacagcactcggccactactcggccttttaacccgagatgtgtcatctgagctcctctacctcactcaggtctcctggccaggggtgcatcatccggtctttgcttatcacatgcaagacataatccctaaccggggtgagatacaatctcagtaaactcagggttctttgaggcctctcctccccctggttcacttcccacgatacatagcatcaaaaggcatatcatacaatacatcacatgtatgtcgcaacacaggtgccattccgttgggcactaccaacatcaggaatgcaacacaaatatcacatacacacacacacatatatatatatatatcactgagaaagatcatccacttaagggcacagtctcaggaattgtcgacgtatatgcctcttccaagagaagttcatccacttaagggcatcgactctcgggttttctactcatataattaaccacgaagagttgttccacatgactttagctcttcgggaagtccatatatagtctattctactagccagagaatctcatcattcatataacatatcatcatagtatgcatcatacacatgttattagtaaaagtagaacacaccatttcaataccacatgcatcatgacatacaataagcaacactctctcggagtatggtggaacacagtcaatgggaaacactcccaagaacaaagagcttacctgctccagatgttataccagctctctcgtcctcgtggtcacaaccaccaatgtccttcgtatcacgctctacaaaagacatgcaagcaatcaataacgatcatcaaccgttgcatgcaagcgatccataacggctatcacttgtttgcatgaaaaggaacgctattcctttttccaaaggacctaagtctagttcgagttctaactcagatgggtcattgttcatcccaaaacaatttctcaaaataatcgataagacttgtgtctcttacctctaaaaatgcccaggaaagctaggggacggcttttccacgcttgagcgtcccaaaaccttcttccccttcaaaactaaacttggtgggactcttggagaaagcaatctctccttctggtggttggaatctggctattgggtggttcctatcaactttccagttgcatgcaaagggtttcggtcgagggtaagaggttatgaagtttctctctccaagaaatggtagagacagagaaaggaagaagactatggtgtttctgtaaggaaacgtgtaggaatggtcatatatatatatagatgactctggcgcgtgtgttacacgctttcgatgccactctggcactatcgggtgcaaatataccgctaagtctaccttgtcaagtttggtatgcataacccggtacccatgtgcaagtttagttcaaggtctgtcctcatccgggttcattccccggcaccttattaaagccttgataaacgcgaggtctcccccttccgagttcccacctcggtcacttagtaaaatttcaaggtccaaccttcatcgcaactacctcctaagtacatttttccaaagtgccacctcggacacatgagtatgggttcctcgttagcactactttaggagcgcgatcccggatccattacagggtcataacacaagatttttggacctaattacgtatttaatataggtaattacccatctaaacctggattggttacaggactataacagtaatcaagatcttgtgcatctatttaatcaagaggtacccaagaaagatgtttttagatacttgagatcaattttacaaaaaggtggagagattgatgaggatgtaaatcatagaatcagagcagggtggatgaaatgacggagtgtgtctgggttgttgtgtgaccgcaaaattccccttaagctaaaaggaaaattctatagaataactgtaagacctgtaatgttgtatggagccgaatgttggctagaacatagccaacatgagcataaaataggggtagaaaaaatgaggatgttaaggtggatatgtggttatacgaagattgataatgaagatatttgacgaaagatagcagtagtatcggtgagtgaaaagatgagaaaacatagattgaggttttttggacacgtaataagatggcccatggatgctcctataagaacaaaatcttgttaccaaagagctcgacacaaagagaggtagaggtagactgaaacttaccaggaaaaaagtagttaaacaagacttaatggagtgggatatagattgatggacgatgtgtcttagaacgaaatgaagaaaagctataagcttggtgtagaggtagacccgttgttgtctctatattccagatagtccctttttagtcatttttctcttcatctctctcctctttttttcccccatcttttcttttatcttttttttcaatctcctcgtatttatcattgagttcatctaccacttactccaattagttagggttaaaggtgttgttgatgttgatgttgatcattgtaaataatggttaactattttcatctgtggatgtttttttattatgtatgtggattatgtacttctgatacctttttgtattcataaattccatatttgtatgataaaaaatgtgtcacatcactttttcaatctttttcttcttttcataggtttatttattgtatttttgttctttctttcctcttttcatcacttttattttgtttaatatattgtgtcatcatgatatgaaacaatacgggggttcattgttttacggatcatcctcgaaaaggcttcttgttataacaaaggaaagatgttcttggaaagaaaaaggtgcatgccaagtgtttgatgaagcgaaacaaagataaagataatataaagaaaagtgtagcacaaaaataacgaatttaacacgaacaaaatgttaaaaaaattagaataaaaaaaggcgaaaaagacaagaaatggaagaagacaccacaccttatgaagaatgataagtacggtgggaattcgccacaacgattatagaaacctttgataagaaccaatgtttggtccaattaagaatccaagaggaacttcctctcgcactttgaaaagtgcaaattttttattcaattccaaggtgagtacataagacaaatggatggctatttatagccaacaagtggtgtctctctcctctttctaatgtaggacttcaaccacatattcctcattcaaaattacactaaaaaaatctaaacaaaaggtaattttcgtccataacttcgagctcaacttaccgtccaattttcatcatcatagatgcagaattaggacttgagactagaaatacgatttctaggaaatcttcagagattttgaacgcatcaaagaaatcctaaaactaacatctagaactcaagttatgttcaaaacattggagtaatatgggcttttcactcattggtctttggctcttcactcatttgaatcaattagagtaatctgagctcttctttcgggttggtctttggactcaaggcaaggttgatatgttggtccaatgcttgagaaagaaagtagttcacttcatgatccaatgcttcttgtacttcctttgatcacaacttgtcatggggcctctcaattcttagtcctcatcacatcttctttcttttattccccagtgattaattatgttttaatgtttaggtgtttttctatttttcttttcttttttgtttgtctataatgttattttttttctcggttttattccataggctgtatatatttgactgtctcaagttataacattattgttttctatctattttcatatcttaacttgcaccaaaatacagtgttcttatttttataaattatattacttcaaattttattttctcatccaaattctacctggtttgtttcaaggaattttgatgatattttcaaaattcaatttccatggaacaagggttttatcaaccaaattttggtgactaattgtttgctattgtctctttttctttaattcagctactttttcaaaaaaaaaattaactgttttctgtttgttttgaagttggtatttttcaaaagaataaattgtatctttgtttttattcagttatttttaaagaaaaaaactgctatgttctatgtttttaattcagtttttttataaaaaaaaactattatctcttttatttttattcaattgcttttttatatataaaaaaaaagaacttgagtgatttctactaannnnnnnnnnnnnnnnnnnnnnnnnnnnnnnnnnnnnnnnnnnnnnnnnnnnnnnnnnnnnnnnnnnnnnnnnnnnnnnnnnnnnnnnnnnnnnnnnnnnnnnnnnnnnnnnnnnnnnnnnnnnnnnnnnnnnnnnnnnnnnnnnnnnnnnnnnnnnnnnnnnnnnnnnnnnnnnnnnnnnnnnnnnnnnnnnnnnnnnnnnnnnnnnnnnnnnnnnnnnnnnnnnnnnnnnnnnnnnnnnnnnnnnnnnnnnnnnnnnnnnnnnnnnnnnnnnnnnnnnnnnnnnnnnnnnnnnnnnnnnnnnnnnnnnnnnnnnnnnnnnnnnnnnnnnnnnnnnnnnnnnnnnnnnnnnnnnnnnnnnnnnnnnnnnnnnnnnnnnnnnnnnnnnnnnnnnnnnnnnnnnnnnnnnnnnnnnnnnnnnnnnnnnnnnnnnnnnnnnnnnnnnnnnnnnnnnnnnnnnnnnnnnnnnnnnnnnnnnnnnnnnnnnnnnnnnnnnnnnnnnnnnnnnnnnnnnnnnnnnnnnnnnnnnnnnnnnnnnnnnnnnnnnnnnnnnnnnnnnnnnnnnnnnnnnnnnnnnnnnnnnnnnnnnnnnnnnnnnnnnnnnnnnnnnnnnnnnnnnnnnnnnnnnnnnnnnnnnnnnnnnnnnnnnnnnnnnnnnnnnnnnnnnnnnnnnnnnnnnnnnnnnnnnnnnnnnnnnnnnnnnnnnnnnnnnnnnnnnnnnnnnnnnnnnnnnnnnnnnnnnnnnnnnnnnnnnnnnnnnnnnnnnnnnnnnnnnnnnnnnnnnnnnnnnnnnnnnnnnnnnnnnnnnnnnnnnnnnnnnnnnnnnnnnnnnnnnnnnnnnnnnnnnnnnnnnnnnnnnnnnnnnnnnnnnnnnnnnnnnnnnnnnnnnnnnnnnnnnnnnnnnnnnnnnnnnnnnnnnnnnnnnnnnnnnnnnnnnnnnnnnnnnnnnnnnnnnnnnnnnnnnnnnnnnnnnnnnnnnnnnnnnnnnnnnnnnnnnnnnnnnnnnnnnnnnnnnnnnnnnnnnnnnnnnnnnnnnnnnnnnnnnnnnnnnnnnnnnnnnnnnnnnnnnnnnnnnnnnnnnnnnnnnnnnnnnnnnnnnnnnnnnnnnnnnnnnnnnnnnnnnnnnnnnnnnnnnnnnnnnnnnnnnnnnnnnnnnnnnnnnnnnnnnnnnnnnnnnnnnnnnnnnnnnnnnnnnnnnnnnnnnnnnnnnnnnnnnnnnnnnnnnnnnnnnnnnnnnnnnnnnnnnnnnnnnnnnnnnnnnnnnnnnnnnnnnnnnnnnnnnnnnnnnnnnnnnnnnnnnnnnnnnnnnnnnnnnnnnnnnnnnnnnnnnnnnnnnnnnnnnnnnnnnnnnnnnnnnnnnnnnnnnnnnnnnnnnnnnnnnnnnnnnnnnnnnnnnnnnnnnnnnnnnnnnnnnnnnnnnnnnnnnnnnnnnnnnnnnnnnnnnnnnnnnnnnnnnnnnnnnnnnnnnnnnnnnnnnnnnnnnnnnnnnnnnnnnnnnnnnnnnnnnnnnnnnnnnnnnnnnnnnnnnnnnnnnnnnnnnnnnnnnnnnnnnnnnnnnnnnnnnnnnnnnnnnnnnnnnnnnnnnnnnnnnnnnnnnnnnnnnnnnnnnnnnnnnnnnnnnnnnnnnnnnnnnnnnnnnnnnnnnnnnnnnnnnnnnnnnnnnnnnnnnnnnnnnnnnnnnnnnnnnnnnnnnnnnnnnnnnnnnnnnnnnnnnaaattagaataaagatttacattgtaatttatataaattaataattgtgctgcagggaacaaatatttgttttataactaaatttaaaataaataaatatcttgttatatatatatatataaattatatgtttaaatatatttttagtcaatcacacttaagatttgtattttttagttctctaaattaaaattatattctctaatnnnnnnnnnnnnnnnnnnnnnagtaaaaaaaaaaaagattaaaaatatatttttcaaacttgagattaaggaagtaaaaatatgtgtaaatttaaattatattataattaagaattgtaataaataaatatttttttaatgtataaattatatttcaaaattacaataaagaatggaaataatccgaatatctaatgaaagaatggaaataaatgaactggtgggtagaaaggagaaaggttaaattatcagaactattaattcttacatttaaaatgatttatgattttgatcagggacgcgttcttattatggtttggttatttccttggtccaaactgagcccaaatatttttccttttttcaacttaacctgtagcccaaggttgagcctacaaagggtttaatatctcttttctcatcgtttttttttttttcattttatttttcaaacaagacaatggagcaatgaggaacagaaaataaatataacaattagcaaataagaaataaaagggaaatattactagtaattactgttaactttccattaggaaaatttacattttcagtctccaacacaaccgaagacacagacagccaaggctgattacaaaaggatcggtaatcaaaagcaaacaacacttaataacactcccaataacaacaccaaaatgaagaagacactattatcccaatactaattggcgggtgnnnnnnnnnnnnnnnnnnnnnnnnnnnnnnnnnnnnnnnnnnnnnnnnnnnnnnnnnnnnnnnnnnnnnnnnnnnnnnnnnnnnnnnnntttaaaaaaaaaaaaaaaaacaccccagtgatcaagaagggtctaaaaaaataggcccccacttgttgacacaaaagaaattaaaattaaaatgaaggagcaatttaaaacataccccttcttaaatcttaattccctggccttctaaaattaccaaaaactgaccccttcacctagcagcatactatctaataccctagtatactaaccagtcataataaactcattaataatactcttagaacatactaataccatatatctattatactatatagtagtagtatctgaatgtgtgactaagacctttggacaacaagatctagcggaattgagcaccagtgtaggtttggccaaaggaccagccagatggggcaacattgttggacacaatagttctgccatcacttgtggtgaccttaaaggagaggctttgaccattgaggtagttgttactctgccagttctgaccccagtttcttgacattggcatccaactagttcttgaacccttgattgaaacagaatgcacatcaccagcaccaccaacgtttgttatgagaactaggttgaagtaggagtgtccattgattgtgaacctgatccctccctttctcctacaagccaccctatacacaaatccaccaataacacagaagtttagttgttgttaaccaacaaaagtaagaatatcatacaatagtcttgcaagaaataggttcttgaaaaagtttcaaaatttatttagtccctagaaattaaagggtaatatatgcattagattcctcaaaaatttgtcaaatccctacactttataatttcaatgtaagccctaaaaccaactttgaccaaaacttgaagaatcctaaccacattttacccaaaattttacaagttaacaaaacaaaagcagatttagtccattaataaaatataagaactaagaaaatattagaaacaaacctttccaaatatttgaggaaataaaggaatgaaaaacaactgtatagttgaaatgagtgaaatcaatcaagtaacctataccttctgtaggagacagggacaattccagctttgtactgagcaatgcgtaggaagacaggttgagctaggtcaaagtgttggagaggagggttacaccagccaccattgttgttgggtaaggcattgtttggaggacagaaattggtggcagtgaccacaatagaacctggaaggcaccacctgtggtcattggcacacctaatctcatagcaagagccacagctcaagccattgttgaacagtgcggtgcttagagcagcagtgtttgttccatacccttggctgtagaggttcccatacccacatgccccacctgcacaaacacacaaattagtcaaatgggttggctccaaaatgcttcaaaatcagttttttaagggtaaaaaatgaatctttatgttaaaaattagtgctttgaattgttgcatagaacatacccattgtcccagatgcatcactccctccataaaaggtagcatgagcattagtccaccctccaccataggcatgagcagaggagaacattgtgagaaaacccatcaagagcaacccaatgagagccattttcctgaaaacaaaacagaagaaaagaaaaaaaaaatcagacattattttcttacacatgttaacaacatttgtgtagctgtagaagaactaagaactcttcctcagccttcaaatgttgaaacaattaactaacttcaggtagatatgaatggaaaaggaaattactttgaaaatgaggagtctaaggaaattagcaaaggagaggagattcagggttgtgaagaaaaatgtgagggagtgccacctaatttatagaccctgaggggtagggaaatagcaccaaagttcaattaactgtttttgaattgtttggaccaaaaaaaccgctaagggtataagtggttttttggtaatgaaattgttaaaaaaaaaaacagttcaagttgtgaaattgtttaaaaaaagaaaaaaagttcaagttgccaagaggtccacttatgaattttgtggcaggaaaatctccaaaatccatgtgggccatagcggttttagctctgatggtcaacaagcttctacgatcacatgctatgcgagcatcaaccattttgcctcaaatacccttctccgtttctttttcccaattcacttctcttttgctccaacttctcaatgctttactttcaaaatagtaataaattttaggggtgtagaaaattactttttgatttctcatattttcattgaataaaatgataaaaacattttttgatgaatataatagaaaaataacataactaatttttttatattaaaattattcaatgaaaaaatatttctacaaagctttcaaatgacaatattttaaggaaaatgttatcaaatactctaaaatataatggttaagaaaataaaaatattttttattaaaaaatgtaacaatgtatatttctatgatatgatttttcatccaatccctgcctaaatttaaattgagagtttgagacctttattttaaaatgagagagagtatagtgttatactactgttattgtttaccctttacagaatcctcagtgctttgaacaaaaaaaatctcattcacgattcaatgctttttatgattttctctctctagctttttacaacagacacagacagaagcacaattcagttcgtaagtaaaacggtcagaactctgatttaatgtaagaattattttttgatttttactctgagccaatagtacttttcatttttcttttaactgttgctgtccattctctcgataaatcagtttaaaatttctgacgaatttttagtataataaagcaaatcattgagtaatcttccgaaagattagaaanacaagtatatgatactatgaatgattatttcaaaaatatataagatacaatatatataaatagtatttagaaatataaaaaaatcataaaaataacatattaaatatattattacaattatgtaaatctaaattaaaaatgtatttcttgaacatcagtgaaaccaaaaaaattataattaattgttatcataaattactcaagattctatatttatatcatatacatacttatatgtttcatgtaattcagtaattatattagattttcataaaatactttaaaattttggatattttatcgatccgtatttacaaaaaatccaaagagtttcaatatgtgaaacaaattaaattttaatgtttcatatggttagacacttcactaatacgtatcactatcaaatacacagataagtgaggcaaattggagtatcgatacttcattgataacaacagacagatataaaccttatgagggaaatgttcattcatgagtaaaaaaattcaattattttcagtttgaataatgagtaaaaaattggttatcactattgttttggaaagtaataataggctaatagcagtacccaattttaaccacacataataaatgtcataggttcggagctacgtaacaaacaacacagagcacagcccctacaatctctaattcgctgagtctgaacatgtctggttactgccgaggactctaataccaaagtatatagttcacaccagagaaattaatgcaacgaagctaccctccagcacatggtttatgacaatttgagtcagttggagcaaaagctcataacttcgttgaaatttcttgccttctaatttattactaaatattctctcattaatttcaaattctacaagttgaaataagcaagctaaaatgttcatctacatttatataaggtaaaatgttaatcaatatctttggaatatagattaattaaaaattaaaaaaaatgattaatatatgtaacattactttctcgtgtttattattgagttcatctatcaacgacctcaattaatttggtttaaaaatattattgatgttgatattgatatatgatctttataataaatattttttctttaattttttaattaatactctatgaatactgattaatcagatcctttatattatgtttatctttgtctttgtgcattagtgtgtttttctaataacttggtgtaatcttttggccagctggattttgattatgtgtgaagcaaatcatgaatcttcgtagataagatctgcatggaaaacgataagtttgattaggaaattttaggtgaactggtgatatatgtaaaccgcgattctcgggcagtagtgttatttaatttaatcgttattacaacttataagaaactagaattattgtgtgtgcaaaatggcacgagttgcacgactagtgtaatattctaaataataatagtaaagtttaaaatgtatatttacacatacacatttaaattactttcttattttctaattatatattcttataaactggtccaaaaaaacttataagttttttgaatgtattaccaaacacaacacaattgacactctaattcaatttgcattctttacaaataatttgtaattataatttttattattatcctcatttagaaatattttagaaaaatttaaatgaacatattgattgatgggtttataacattcttatttatctatttatactccttattaataacatactgacaatttattaaataaaactcatttaaatagattatttctattcttgtaaaaaaatatttctattagttaaatagcattcatggcggnnnnnnnnnnnnnnaaatttaaaaacaaaattaatctcagatacaagaattcaaattcaaagctttaaaaagtactaaaattcaataaattaagataaattcaaatcaaaccatttgttacattatttaataattatattaaaatgctcaaaaggactttgcaattctgtgatttccaaaatatggataataccgcatccaatactcaaaatatgacttatcattttggttaacttttattttgattcaaccccgattaagactttaaatatttggtatgacacaaccctgaagagctagattctgagttagacactatttaggttcttctgaatcttacaaagtcatttgaaaatgaatataaatggctagaaagaaaactcacggaaaaatgaggtataataaaattatgtgttttcattacttacatgttttatttagttttgcataataaaattacgaaaaggtatccaccaaaatctactggcaatcaagaatacacgttgaaagattagcatctccgagtaagaatatttaaaagaaaagttttcaagtctaacccaaaattgagacaatcgatgttcacaattcaatttctaatatgcctagtggaaaactttgaaactattttgaattcactcaacgagcatggttcgataagcaaaagtgacattgaggaggaatttcactaagccagcttgtctcgttgaacaaaagatccttgaaacaaattttatcctctttttcaaaacaagtgttttaaaggcttaggagttgaagtcattctttaataattgtgttttaaaaaccaaaggacttaattatgaaagacagggggaatcgataaatatttgtgttaattgttgtatgtttaaagggtgcatgatcataatacattgatttgtcaatgattaattcattgttgaaatccttatattgttgtggagaaggttatattttgtgaggtgatgttactaattctaagtgttgatattggtgaatgattgtatgattgatgcatgatgatttgttgatctagataataatgtgaatatgaatttggtattagattcaccctatgtgttgaaggggttagttatatcctttgaaagatttttgttgtttttgaaaatgatatacttaggagggtgagtttcacactagaaacttcgtctcactaaagcgacccgaggtttcgtctagtaaggtatcttttcaagtaccacccatatgtatttgactttgaattgtgtgtcagagtgttgagaagctactttccaagaggtttagtgactcttttagcatatagtggacgagttgttgttgttgtgtggatgaatggttgttgagatgtgtttggaccctaagttagaccataggagatgacgggtatgtaagtgttgtatctaaaactgtgaatgtttccaaatatattttagtgtttgtatacagtgggtacgcaactggtgcatgtgcatatgagaaggcatggaagttgtaactactcgatggggatcccaacctagtgtggagttaccttcatggtgatccaataggactatgagtgggcaaatctcacacgtaacccaaggttttctgcagaccttatgtcgtggtaagtcactatcaacactcatatttttagtaaaaccacttgtttcccataggattggtcttaggacttcccgaatggatgggtgtgaaatctatgttaaggaataagcctaagatgatcactcaaagtgaaagtcttcatggagtcaagtctgcatgatgttgtgtgaccattattatggttgttgaatgttagtacgtcattgtggaatttcaatgatgatacttgatagttgaattgaaatgattgtgtgcttgatgttctcttatatgattgagatgtcactattgcgtgaattaaatatgccatgttttaagaacaatgaaacatgtatatgtattatttgataaagtttagattattgttatttgttgaatttccaatgcttttaagtatgttgtttatggtgaccttacccttgcatgtggcacatgtggttgtgactgtgatgatcttgtattcgacgtacatggggagcatatgacttctaaagtggatctttctcgtggaagcgtggtagacagagcaagcatgggacatgaagttgtgtcattctcttccttttcattggtttagtttttgtataaaaatgataagcttagttttgtcttatgtaaaatttccaggagttttatgtaatcaaagtatggttgaagtgtgatgagccataagtggtgatttgattatgtttagtatatgcatggctttcgttatacactgttggttttttaatttgaaaagtttacaagaacttttctaaataaattaattatatagttttaattgaattaaaataagtctttcgctttgttagtcagtgagttatcatgtagcgacgacgggtcgttacatattgggagaaatgtgtgctctaataccatttgtaatgtccttgattattaatgtcttgatggctcacaatttacgacattttacacaataacacttcattcaactttctcattggcattaaccttctataaatagtcattttcaacttcatcttttcattgaattttttttggtttacaaaagactcaagcaaaattaccttatattttgtcctttgtagtttctaggtcaaatctcgacatgtgccaatagagacttagcttggtttactatattgttgcaagactttgggatttcatccatcacaacaatattcttatgtaataagacttgagtctggtctgcataaagttctggcctggtctgaaagtatatatacaaaacttgattaaaccagaacaaataattaaaagtaaaaaaatcagcataatagatatgcttctcttataagttataaattacgaaacatgattttataagttataatttagacaaactcactattcaggcttagttgactttttttaaagcctttcgtttgacctttttaattaaaaaggcttttttaaaaagcttaaatttgacctttttaattaaaaatactttttaaaagcttaaatttgacatttttaataaataagccaaaccagatcaagtcagaccttaatcagaccaggtcatgggcccctgataggatgtctgacctattttcattcctagtaataaccaagtgactatttacgtaacatccaatccctctatttactaatactctaaatacattgagatgaattgttactgtgtaaaataaacaccataaatatagatgtataccacccatcttgagaaagagttttccaattggcttcatttaacaaatttaattttgaaagattattcaattagttattatgttgaatctattctattgatataaaaattatttaagaaatataaagttgatttgatagtgaagaaaataagaaaaagataaaaagtcgtgaaatcaaatctttcaaagataaaaaactaaaaattaataactaatatttatcaatttaaaaatataaaaattatgtctgtaattttttattatacaacatatatttgtatccacgtatacctataaccatttctcttttttaattccaccacagcattttttttcttttttttagaggaagcatttttttctctatagttaattttaatttgtactaattaaataacttaaaaaacttctactaattaacatttattttatagcttatttgtgtccgtaacaaanaacttaaaaaacttctactaattaacatttattttatagcttatttgtgtccgtaacaaaaaacaattgatcataataaaagcaaactgaatactaacacacacacaaaaaaaaaagtttgactttttttttttgaggatagaatgttacagtaaatggagcccgacatataatcaagaatgactagttaaagataggaaagaaaaatcagcatttcagacagaaattcaaagccatgctaatcttttagtggtaaaaaataaaaataaaaataaaatataataatagcagttgttgtttgttgtaccaaacaatacatacgcgaatcaaggtatgtgccatttgtcagattgatagcgaaatgtgaatcctttagcggcgctaaggtagcatgtgcatgtgcttatggtttggctttttctttgcttgttcaaattatgttggattgcaacaatatgattattctttttgaaattttatttattgtggggtagcagaggaaagtttcacaaaaagggaggagaaaccaacaaaactattgacattagcgatatttacttatgcttttaattaagtaattcaatatttaaattttaattattttttaaatataaaataaataatattgagaaacaaaaaatacttatttgatgcatggttaaaattttcgataaaaatttatcatgattttttaagacagattttttttaccaatatcatattaaaaaataacgggggagaggattggagaaaccaaatcagatatgctgtcaaattaaagggagaattgcagagactttgttatgtcttcgtcatgggtaatttttcttttgtccatttcctctctgcagtgtgtagtgtagttgagcctttcccactaatggccaaaataattaaaaacaaacctttttttcacagatagaaaagggtatttttcatcctctagtattttttggttaatagctctaaaattgaagggggaaacagtataatttttaacatttggatttgatttaatgttcaatagcatgatttccaagttatacctaggtaagattgcatcaaacctcaatcaaactctggtttcttctctaattggcttattaacattcaacgaaaaacaaaagacattgaattacaattgttgaaaagaaagcataaaactaggcagaaagtgaatcgagatattggggggaaaaaagtagtattatttatagaattttaattaaagtaataaattattataaaattaaataatattattatataataaaaaatataaatcttactaatcagtatcttaagatcattaattaaggaattaaaataaaaattacaaaaaaatatacaaaaattatgaataacgtaatttatgtattttaataaaaaaaagtcatagcatttgtttaaatatattatcaactttttaattaatttttaagataatatattttaaaaacgattattaattatataattatatcaataaaataattatttttacaaaaatactttttttcaaaactaaaaataattaaagtactataattataaaggaattttaatattcaagtaaaatatcattaaataaaaaatcactattaaaactagtcaatattttttttctaaaaataaaatagttttaaaacaaattaacggactacacgtgccatcactattcactgctacgagacacaggcacacaggtagaagaatattagggtatgtttgggagagggagttaggaggggaagggagggaaaggaaaggtatagggagagtcatttccttgtttgccagttttaatttttgagggaaaggatttgaggattttcaaaactcctctgaaatcctccaaagcctataaattgttgtcccccctatttggagggtttttagaaggaaaagtaactaaaattattattttatatcaacactgttaataaaattactatcctaccatagtcaatgtaaaatatataatgtattaattttttaaataagaaaaaaattgtaaaaatttcttattaactctctatttctctctcttaatatatttttaactcccaaacaaggataaaggaacttctctcattttcctccctttctttcccctcccttctccttgaatctctttcctttcccttccctcctaactcccaaacaaagccttaatgtccataacttcctcctcttcaatctgactcatctgctgtttctctctccccggaactcaccaatttttgggacatagaactaatctgaaccgtccatagctctgatctctgacatcacatggcagatgtttgaccagacctttccatctttttatgttactttttcaccgttgccaaggcacaaatattcatttttatggtcctgctgcatgttgatgattttcgatgctcttccctcgtaggaatcattgcctcctggtcaaattcaaatgccacaaatccaaattcacgaaatgatataaggtttcgttatatttgtattagtgtaaataatttatttgatgaaagaattgtttttcattttttagtgtgtataattttcttttaactaatcacaatcatacaaataaaagtaatttctattttaatgagttaaagaatatctatctgtctgatctctgataaaaagataaataaattcaaatgtcacactcacttctctttttggagtaatattactcaaattctttctctattgtttgtcccttatgccatggcgcaacaaagttttgatggaatggtttcggtttagggtgtttatgggtcgatttggatcagttttggataaatttaggattcaattcaatcaaatttgatcggcttgatttggttatattttcagaagaaaaaaaaaataaaacctaacccatttaaatttgatctttttttttcttagaactactattttatatcataattaatccaaatatccaatataattaacacaatagggtaaataatcattttcgtccctgaatatatagagacacgataaattcgtccccgaaagatgaaaattcaaattttagtcctcgaaagtgcaaaaagtgcgataaatcgattcatccgttaacttctgtccgttatcgttaataaaagagcctacgtggcacagagagacgaaaatgtcacaaaaatgattgtcaacatggctgcaaaataaattgaatcaaaatgtcagtaaattttcatttgaccaaaacgtcagtaagtttccattgaacaaatttgttagatcccaaattttgtttcatttaagggtaaaatgcaatttagggtaaatagtcattttcgtccctaaatgtgtagagcactgacaaattcgttttgagatgaaaattcaaattttaatatatctatttacatgcattgcaaatttgctacaactatttatttgtcttctcaggtcattggcacataggatatttttgtccaatagaaacaaattaacattttggtccaatagaaacttactaacattttggtccaatctattcagcagtcgtgttgataatcatttttgtgacatttttgtccctctgtgccacataggctttttcgttaacagtaacggatgaatgaatttgtcacattttttcactttcgggaactaaaatttgaattttcatctttcgaggacgaatttatcagtgctctacacattcagaaatgaaaatgattatttacactaacacaatattatcaaatgtctgaaagtagtaatattgattcatataataccattaacataatattctaaaatagactaatacaaattaaaacaattttttaacgatatttactataatagtctgaatcacaactatttcttacaaactaatttcttgcaataaattttggtgaaaccagatttattacaaccagatttgctgaaataaatgaacaaaatatgatccgttaatattataaacatttgtagttccaacacttggagtcaaatattaataatatttaaacaaaatcaaacaactctaaaaaaattatcggttcagttcggttttaattggatctatagatctaaacccctaacctaacctgtacatgaacgatttggatcggttcggttcgattttgacccaaatacataaatgacccaacccaaatcgtttggatattttgggtcaattcaattttgtgggtgacctgtacccataaacacccttatttggatcctcggaacttgttagttactccaaaattttaattcaattcaatatttttaaatactcacaaattttaataatatataattgactaacaagttttaacaataaatttaaattgataaataactgcataagttatagtattcattttaaatattttctatctatattatttttatcaataaatgtatgtttggtttgaagttaaaattattatgatagatgttataatattgattcaatggataaaaataaaataaaaataataatattgatcctttgacaaaatgacattggtttcaaaagtcattttacacctaattttcaaatatgcatctaatttttattagtgaaagatattcaaattggagacttttcaattccctcttctattttaaccaaaatatcaatcgtataactttattttctttctatatgtattactccataaagcaatcgaaaaaactaaaatttctgaatttttatctataaatctcaactaaaataataataaaatatgttaatataatagtaattattatatattatttttattcattttaactttttattatttttaataatattttttttgtcatttctaaattttttatattgtattttttgttacaattggtaatgtattttaattttacttaataagcatcatgtgtgcatttttttaaaaatggtaagggaactttattatacaactcttctatttattttgtggttaaatataaaatcaacactatttatcaatattaatggttcttaacaatcatggtaatataattagtggtgctcaatattagttcaatgtcaattttttttcctttgtgagaatcttgtttctttctcctttgtgagagtatcattttttaggtttttaggtgagatattattgctagggtttctgtacgagtagtgtgcatgaagggtttattgttgatgaacaacaaggactagctagtttttgaagtagagaaaaataatgacagcaatgttagccttgaactctatctggtggggcattttttcatgaaaaaagtccttagggttctgataatgaaagagagagaatgtttagtatatggagactgagaagagatgtcactactagaaaagcagctttcaacatcggttattttggacttttaacatcggttctcgagcgatgttgaatcaggcgacgttgaaagtggagaatttaacatcgattttcaaaaccgatgttaccaactgtaaagcacatcggtttgtcatcaacaaccgatgtggagttgtcatacatgaaagcgctgaaaagagttaaacgatggtttaaggagtacaacaacatcggttttgatggaaaaccgatgttgtattaataaacaacatcggttattgtaggtgaaccgatgttgttgcttgaaaacaacatcggtttctaatataaaaccgatgttgttttaatcatatcaacatcggttttctctccaaannnnnnnnnnnnnnnnnnnnnnnnnnnnnnnnnnnnnnnnnnnnnnnnnnnnnnnnnnnnnnnnnnnnnnnnnnnnnnnnnnnnnnnnnnnnnnnnnnnnnnnnnnnnnnnnnnnnnnnnnnnnnnnnnnnnnnnnnnnnnnnnnnnnnnnnnnnnnnnnnnnnnnnnnnnnnnnnnnnnnnnnnnnnnnnnnnnnnnnnnnnnnnnnnnnnnnnnnnnnnnnnnnnnnnnnnnnnnnnnnnnnnnnnnnnnnnnnnnnnnnnnnnnnnnnnnnnnnnnnnnnnnnnnnnnnnnnnnnnnnnnnnnnnnnnnnnnnnnnnnnnnnnnnnnnnnnnnnnnnnnnnnnnnnnnnnnnnnnnnnnnnnnnnnnnnnnnnnnnnnnnnnnnnnnnnnnnnnnnnnnnnnnnnnnnnnnnnnnnnnnnnnnnnnnnnnnnnnnnnnnnnnnnnnnnnnnnnnnnnnnnnnnnnnnnnnnnnnnnnnnnnnnnnnnnnnnnnnnnnnnnnnnnnnnnnnnnnnnnnnnnnnnnnnnnnnnnnnnnnnnnnnnnnnnnnnnnnnnnnnnnnnnnnnnnnnnnnnnnnnnnnnnnnnnnnnnnnnnnnnnnnnnnnnnnnnnnnnnnnnnnnnnnnnnnnnnnnnnnnnnnnnnnnnnnnnnnnnnnnnnnnnnnnnnnnnnnnnnnnnnnnnnnnnnnnnnnnnnnnnnnnnnnnnnnnnnnnnnnnnnnnnnnnnnnnnnnnnnnnnnnnnnnnnnnnnnnnnnnnnnnnnnnnnnnnnnnnnnnnnnnnnnnnnnnnnnnnnnnnnnnnnnnnnnnnnnnnnnnnnnnnnnnnnnnnnnnnnnnnnnnnnnnnnnnnnnnnnnnnnnnnnnnnnnnnnnnnnnnnnnnnnnnnnnnnnnnnnnnnnnnnnnnnnnnnnnnnnnnnnnnnnnnnnnnnnnnnnnnnnnnnnnnnnnnnnnnnnnnnnnnnnnnnnnnnnnnnnnnnnnnnnnnnnnnnnnnnnnnnnnnnnnnnnnnnnnnnnnnnnnnnnnnnnnnnnnnnnnnnnnnnnnnnnnnnnnnnnnnnnnnnnnnnnnnnnnnnnnnnnnnnnnnnnnnnnnnnnnnnnnnnnnnnnnnnnnnnnnnnnnnnnnnnnnnnnnnnnnnnnnnnnnnnnnnnnnnnnnnnnnnnnnnnnnnnnnnnnnnnnnnnnnnnnnnnnnnnnnnnnnnnnnnnnnnnnnnnnnnnnnnnnnnnnnnnnnnnnnnnnnnnnnnnnnnnnnnnnnnnnnnnnnnnnnnnnnnnnnnnnnnnnnnnnnnnnnnnnnnnnnnnnnnnnnnnnnnnnnnnnnnnnnnnnnnnnnnnnnnnnnnnnnnnnnnnnnnnnnnnnnnnnnnnnnnnnnnnnnnnnnnnnnnnnnnnnnnnnnnnnnnnnnnnnnnnnnnnnnnnnnnnnnnnnnnnnnnnnnnnnnnnnnnnnnnnnnnnnnnnnnnnnnnnnnnnnnnnnnnnnnnnnnnnnnnnnnnnnnnnnnnnnnnnnnnnnnnnnnnnnnnnnnnnnnnnnnnnnnnnnnnnnnnnnnnnnnnnnnnnnnnnnnnnnnnnnnnnnnnnnnnnnnnnnnnnnnnnnnnnnnnnnnnnnnnnnnnnnnnnnnnnnnnnnnnnnnnnnnnnnnnnnnnnnnnnnnnnnnnnnnnnnnnnnnnnnnnnnnnnnnnnnnnnnnnnnnnnnnnnnnnnnnnnnnnnnnnnnnnnnnnnnnnnnnnnnnnnnnnnnnnnnnnnnnnnnnnnnnnnnnnnnnnnnnnnnnnnnnnnnnnnnnnnnnnnnnnnnnnnnnnnnnnnnnnnnnnnnnnnnnnnnnnnnnnnnnnnnnnnnnnnnnnnnnnnnnnnnnnnnnnnnnnnnnnnnnnnnnnnnnnnnnnnnnnnnnnnnnnnnnnnnnnnnnnnnnnnnnnnnnnnnnnnnnnnnnnnnnnnnnnnnnnnnnnnnnnnnnnnnnnnnnnnnnnnnnnnnnnnnnnnnnnnnnnnnnnnnnnnnnnnnnnnnnnnnnnnnnnnnnnnnnnnnnnnnnnnnnnnnnnnnnnnnnnnnnnnnnnnnnnnnnnnnnnnnnnnnnnnnnnnnnnnnnnnnnnnnnnnnnnnnnnnnnnnnnnnnnnnnnnnnnnnnnnnnnnnnnnnnnnnnnnnnnnnnnnnnnnnnnnnnnnnnnnnnnnnnnnnnnnnnnnnnnnnnnnnnnnnnnnnnnnnnnnnnnnnnnnnnnnnnnnnnnnnnnnnnnnnnnnnnnnnnnnnnnnnnnnnnnnnnnnnnnnnnnnnnnnnnnnnnnnnnnnnnnnnnnnnnnnnnnnnnnnnnnnnnnnnnnnnnnnnnnnnnnnnnnnnnnnnnnnnnnnnnnnnnnnnnnnnnnnnnnnnnnnnnnnnnnnnnnnnnnnnnnnnnnnnnnnnnnnnnnnnnnnnnnnnnnnnnnnnnnnnnnnnnnnnnnnnnnnnnnnnnnnnnnnnnnnnnnnnnnnnnnnnnnnnnnnnnnnnnnnnnnnnnnnnnnnnnnnnnnnnnnnnnnnnnnnnnnnnnnnnnnnnnnnnnnnnnnnnnnnnnnnnnnnnnnnnnnnnnnnnnnnnnnnnnnnnnnnnnnnnnnnnnnnnnnnnnnnnnnnnnnnnnnnnnnnnnnnnnnnnnnnnnnnnnnnnnnnnnnnnnnnnnnnnnnnnnnnnnnnnnnnnnnnnnnnnnnnnnnnnnnnnnnnnnnnnnnnnnnnnnnnnnnnnnnnnnnnnnnnnnnnnnnnnnnnnnnnnnnnnnnnnnnnnnnnnnnnnnnnnnnnnnnnnnnnnnnnnnnnnnnnnnnnnnnnnnnnnnnnnnnnnnnnnnnnnnnnnnnnnnnnnnnnnnnnnnnnnnnnnnnnnnnnnnnnnnnnnnnnnnnnnnnnnnnnnnnnnnnnnnnnnnnnnnnnnnnnnnnnnnnnnnnnnnnnnnnnnnnnnnnnnnnnnnnnnnnnnnnnnnnnnnnnnnnnnnnnnnnnnnnnnnnnnnnnnnnnnnnnnnnnnnnnnnnnnnnnnnnnnnnnnnnnnnnnnnnnnnnnnnnnnnnnnnnnnnnnnnnnnnnnnnnnnnnnnnnnnnnnnnnnnnnnnnnnnnnnnnnnnnnnnnnnnnnnnnnnnnnnnnnnnnnnnnnnnnnnnnnnnnnnnnnnnnnnnnnnnnnnnnnnnnnnnnnnnnnnnnnnnnnnnnnnnnnnnnnnnnnnnnnnnnnnnnnnnnnnnnnnnnnnnnnnnnnnnnnnnnnnnnnnnnnnnnnnnnnnnnnnnnnnnnnnnnnnnnnnnnnnnnnnnnnnnnnnnnnnnnnnnnnnnnnnnnnnnnnnnnnnnnnnnnnnnnnnnnnnnnnnnnnnnnnnnnnnnnnnnnnnnnnnnnnnnnnnnnnnnnnnnnnnnnnnnnnnnnnnnnnnnnnnnnnnnnnnnnnnnnnnnnnnnnnnnnnnnnnnnnnnnnnnnnnnnnnnnnnnnnnnnnnnnnnnnnnnnnnnnnnnnnnnnnnnnnnnnnnnnnnnnnnnnnnnnnnnnnnnnnnnnnnnnnnnnnnnnnnnnnnnnnnnnnnnnnnnnnnnnnnnnnnnnnnnnnnnnnnnnnnnnnnnnnnnnnnnnnnnnnnnnnnnnnnnnnnnnnnnnnnnnnnnnnnnnnnnnnnnnnnnnnnnnnnnnnnnnnnnnnnnnnnnnnnnnnnnnnnnnnnnnnnnnnnnnnnnnnnnnnnnnnnnnnnnnnnnnnnnnnnnnnnnnnnnnnnnnnnnnnnnnnnnnnnnnnnnnnnnnnnnnnnnnnnnnnnnnnnnnnnnnnnnnnnnnnnnnnnnnnnnnnnnnnnnnnnnnnnnnnnnnnnnnnnnnnnnnnnnnnnnnnnnnnnnnnnnnnnnnnnnnnnnnnnnnnnnnnnnnnnnnnnnnnacatttctttttgggccatcagctaacttcctcagcgtttgagatgcagattcatcacgaaatattgtatttttaaaccaatttaagaaagtcttgttatgcgctttcaacagcctattcttcgtcattcttggattactttgacgaagtagtgcttcatgacgaacaatatatggcaacacttcattactgttattcaggacatacaaatgagcttgattgatgtcctgcaacgaaggcgtaataacatgtagccctcgtgtaccctttcctcccactctgtcgtcatgtcgcaactcaggaagaccaataggctgtgctttctgcaggtattctgaacaaaattcaaccgcttcttctgctatgtacctttcaactatggatgcttcaggacggtgaaggttttttgtataccttttcaagatcttcatgtatcgctcgatcgggtacatccaccgtaaataaactggtccacatattttaatttccctcaccagatgaacaactaagtgaaccattatgtcaaaaaatgagggaggaaagtacatctccaactgacacaagataattgccgcctcttcctccaagtcatctaacgttacaggatcgacgacttttgaacaaatggcattgaagaaaaagcacaggcgaatgatagcatgcctgatattcttaggcaaaatgtctcgaatcgccacggctaacagttgttgcatcaagacgtggcaatcatgagacttcaatccaactagttttaaatccgtcatctgtacaaggctcttaatatttgaagagtatccttgtggcactttaactcgacgtagacactgacaaaaactgatcttctcctttcttgacaatgtgtggcatgctggaggcaagtaaatttttttaccatcggacctaggatgtaactgttgacgtatacccatctcagcaagatcttgacgagtgttcaaaccatcctttgtcttcccttgaatgttaagcaacgtgccgatgacactgtcacacacatttttctccacatgcataacatcgaggcaatgtctaacatctagatcagaccagtatggaagctcaaacaatatggacctcttcttccataagcatgtattacctttctgcttcttttgccttttttcaaatacagtatggatggcatcaacccgctcaagaacctgctcaccgattaacggaatcggtgcaagttcatgctcttgacttccatcaaatgcctttttcaatcgccgataaggatgataagatctcaaaaaacgtcgatggcgagtgtaaactgtttttcttccatgttttagttgcaagtaactcgtgtcttgctcacagataggacatgcatgatggcccttaacactgtatccactcaaattgccgtaggcaggaaaatcattaatggtacaaaatagcattgcacgcaacttgaatgtctcctttcgatacccatcaaatacggcaaccccctcatcccacaactttgtcaagtcttcaatcaagggactgagataaacatcaatgtcatttccaggctgttttgggcctgatatcatcatagacaacattatgtattttcgcttcatgcacaaccaaggaggcaggttgtatatgacaagcaaannnnnnnnnnnnnnnnnnnnnnnnnnnnnnnnnnnnnnnnnnnnnnnnnnnnnnnnnnnnnnnnnnnnnnnnnnnnnnnnnnnnnnnnnnnnnnnnnnnnnnnnnnnnnnnnnnnnnnnnnnnnnnnnnnnnnnnnnnnnnnnnnnnnnnnnnnnnnnnnnnnnnnnnnnnnnnnnnnnnnnnnnnnnnnnnnnnnnnnnnnnnnnnnnnnnnnnnnnnnnnnnnnnnnnnnnnnnnnnnnnnnnnnnnnnnnnnnnnnnnnnnnnnnnnnnnnnnnnnnnnnnnnnnnnnnnnnnnnnnnnnnnnnnnnnnnnnnnnnnnnnnnnnnnnnnnnnnnnnnnnnnnnnnnnnnnnnnnnnnnnnnnnnnnnnnnnnnnnnnnnnnnnnnnnnnnnnnnnnnnnnnnnnnnnnnnnnnnnnnnnnnnnnnnnnnnnnnnnnnnnnnnnnnnnnnnnnnnnnnnnnnnnnnnnnnnnnnnnnnnnnnnnnnnnnnnnnnnnnnnnnnnnnnnnnnnnnnnnnnnnnnnnnnnnnnnnnnnnnnnnnnnnnnnnnnnnnnnnnnnnnnnnnnnnnnnnnnnnnnnnnnnnnnnnnnnnnnnnnnnnnnnnnnnnnnnnnnnnnnnnnnnnnnnnnnnnnnnnnnnnnnnnnnnnnnnnnnnnnnnnnnnnnnnnnnnnnnnnnnnnnnnnnnnnnnnnnnnnnnnnnnnnnnnnnnnnnnnnnnnnnnnnnnnnnnnnnnnnnnnnnnnnnnnnnnnnnnnnnnnnnnnnnnnnnnnnnnnnnnnnnnnnnnnnnnnnnnnnnnnnnnnnnnnnnnnnnnnnnnnnnnnnnnnnnnnnnnnnnnnnnnnnnnnnnnnnnnnnnnnnnnnnnnnnnnnnnnnnnnnnnnnnnnnnnnnnnnnnnnnnnnnnnnnnnnnnnnnnnnnnnnnnnnnnnnnnnnnnnnnnnnnnnnnnnnnnnnnnnnnnnnnnnnnnnnnnnnnnnnnnnnnnnnnnnnnnnnnnnnnnnnnnnnnnnnnnnnnnnnnnnnnnnnnnnnnnnnnnnnnnnnnnnnnnnnnnnnnnnnnnnnnnnnnnnnnnnnnnnnnnnnnnnnnnnnnnnnnnnnnnnnnnnnnnnnnnnnnnnnnnnnnnnnnnnnnnnnnnnnnnnnnnnnnnnnnnnnnnnnnnnnnnnnnnnnnnnnnnnnnnnnnnnnnnnnnnnnnnnnnnnnnnnnnnnnnnnnnnnnnnnnnnnnnnnnnnnnnnnnnnnnnnnnnnnnnnnnnnnnnnnnnnnnnnnnnnnnnnnnnnnnnnnnnnnnnnnnnnnnnnnnnnnnnnnnnnnnnnnnnnnnnnnnnnnnnnnnnnnnnnnnnnnnnnnnnnnnnnnnnnnnnnnnnnnnnnnnnnnnnnnnnnnnnnnnnnnnnnnnnnnnnnnnnnnnnnnnnnnnnnnnnnnnnnnnnnnnnnnnnnnnnnnnnnnnnnnnnnnnnnnnnnnnnnnnnnnnnnnnnnnnnnnnnnnnnnnnnnnnnnnnnnnnnnnnnnnnnnnnnnnnnnnnnnnnnnnnnnnnnnnnnnnnnnnnnnnnnnnnnnnnnnnnnnnnnnnnnnnnnnnnnnnnnnnnnnnnnnnnnnnnnnnnnnnnnnnnnnnnnnnnnnnnnnnnnnnnnnnnnnnnnnnnnnnnnnnnnnnnnnnnnnnnnnnnnnnnnnnnnnnnnnnnnnnnnnnnnnnnnnnnnnnnnnnnnnnnnnnnnnnnnnnnnnnnnnnnnnnnnnnnnnnnnnnnnnnnnnnnnnnnnnnnnnnnnnnnnnnnnnnnnnnnnnnnnnnnnnnnnnnnnnnnnnnnnnnnnnnnnnnnnnnnnnnnnnnnnnnnnnnnnnnnnnnnnnnnnnnnnnnnnnnnnnnnnnnnnnnnnnnnnnnnnnnnnnnnnnnnnnnnnnnnnnnnnnnnnnnnnnnnnnnnnnnnnnnnnnnnnnnnnnnnnnnnnnnnnnnnnnnnnnnnnnnnnnnnnnnnnnnnnnnnnnnnnnnnnnnnnnnnnnnnnnnnnnnnnnnnnnnnnnnnnnnnnnnnnnnnnnnnnnnnnnnnnnnnnnnnnnnnnnnnnnnnnnnnnnnnnnnnnnnnnnnnnnnnnnnnnnnnnnnnnnnnnnnnnnnnnnnnnnnnnnnnnnnnnnnnnnnnnnnnnnnnnnnnnnnnnnnnnnnnnnnnnnnnnnnnnnnnnnnnnnnnnnnnnnnnnnnnnnnnnnnnnnnnnnnnnnnnnnnnnnnnnnnnnnnnnnnnnnnnnnnnnnnnnnnnnnnnnnnnnnnnnnnnnnnnnnnnnnnnnnnnnnnnnnnnnnnnnnnnnnnnnnnnnnnnnnnnnnnnnnnnnnnnnnnnnnnnnnnnnnnnnnnnnnnnnnnnnnnnnnnnnnnnnnnnnnnnnnnnnnnnnnnnnnnnnnnnnnnnnnnnnnnnnnnnnnnnnnnnnnnnnnnnnnnnnnnnnnnnnnnnnnnnnnnnnnnnnnnnnnnnnnnnnnnnnnnnnnnnnnnnnnnnnnnnnnnnnnnnnnnnnnnnnnnnnnnnnnnnnnnnnnnnnnnnnnnnnnnnnnnnnnnnnnnnnnnnnnnnnnnnnnnnnnnnnnnnnnnnnnnnnnnnnnnnnnnnnnnnnnnnnnnnnnnnnnnnnnnnnnnnnnnnnnnnnnnnnnnnnnnnnnnnnnnnnnnnnnnnnnnnnnnnnnnnnnnnnnnnnnnnnnnnnnnnnnnnnnnnnnnnnnnnnnnnnnnnnnnnnnnnnnnnnnnnnnnnnnnnnnnnnnnnnnnnnnnnnnnnnnnnnnnnnnnnnnnnnnnnnnnnnnnnnnnnnnnnnnnnnnnnnnnnnnnnnnnnnnnnnnnnnnnnnnnnnnnnnnnnnnnnnnnnnnnnnnnnnnnnnnnnnnnnnnnnnnnnnnnnnnnnnnnnnnnnnnnnnnnnnnnnnnnnnnnnnnnnnnnnnnnnnnnnnnnnnnnnnnnnnnnnnnnnnnnnnnnnnnnnnnnnnnnnnnnnnnnnnnnnnnnnnnnnnnnnnnnnnnnnnnnnnnnnnnnnnnnnnnnnnnnnnnnnnnnnnnnnnnnnnnnnnnnnnnnnnnnnnnnnnnnnnnnnnnnnnnnnnnnnnnnnnnnnnnnnnnnnnnnnnnnnnnnnnnnnnnnnnnnnnnnnnnnnnnnnnnnnnnnnnnnnnnnnnnnnnnnnnnnnnnnnnnnnnnnnnnnnnnnnnnnnnnnnnnnnnnnnnnnnnnnnnnnnnnnnnnnnnnnnnnnnnnnnnnnnnnnnnnnnnnnnnnnnnnnnnnnnnnnnnnnnnnnnnnnnnnnnnnnnnnnnnnnnnnnnnnnnnnnnnnnnnnnnnnnnnnnnnnnnnnnnnnnnnnnnnnnnnnnnnnnnnnnnnnnnnnnnnnnnnnnnnnnnnnnnnnnnnnnnnnnnnnnnnnnnnnnnnnnnnnnnnnnnnnnnnnnnnnnnnnnnnnnnnnnnnnnnnnnnnnnnnnnnnnnnnnnnnnnnnnnnnnnnnnnnnnnnnnnnnnnnnnnnnnnnnnnnnnnnnnnnnnnnnnnnnnnnnnnnnnnnnnnnnnnnnnnnnnnnnnnnnnnnnnnnnnnnnnnnnnnnnnnnnnnnnnnnnnnnnnnnnnnnnnnnnnnnnnnnnnnnnnnnnnnnnnnnnnnnnnnnnnnnnnnnnnnnnnnnnnnnnnnnnnnnnnnnnnnnnnnnnnnnnnnnnnnnnnnnnnnnnnnnnnnnnnnnnnnnnnnnnnnnnnnnnnnnnnnnnnnnnnnnnnnnnnnnnnnnnnnnnnnnnnnnnnnnnnnnnnnnnnnnnnnnnnnnnnnnnnnnnnnnnnnnnnnnnnnnnnnnnnnnnnnnnnnnnnnnnnnnnnnnnnnnnnnnnnnnnnnnnnnnnnnnnnnnnnnnnnnnnnnnnnnnnnnnnnnnnnnnnnnnnnnnnnnnnnnnnnnnnnnnnnnnnnnnnnnnnnnnnnnnnnnnnnnnnnnnnnnnnnnnnnnnnnnnnnnnnnnnnnnnnnnnnnnnnnnnnnnnnnnnnnnnnnnnnnnnnnnnnnnnnnnnnnnnnnnnnnnnnnnnnnnnnnnnnnnnnnnnnnnnnnnnnnnnnnnnnnnnnnnnnnnnnnnnnnnnnnnnnnnnnnnnnnnnnnnnnnnnnnnnnnnnnnnnnnnnnnnnnnnnnnnnnnnnnnnnnnnnnnnnnnnnnnnnnnnnnnnnnnnnnnnnnnnnnnnnnnnnnnnnnnnnnnnnnnnnnnnnnnnnnnnnnnnnnnnnnnnnnnnnnnnnnnnnnnnnnnnnnnnnnnnnnnnnnnnnnnnnnnnnnnnnnnnnnnnnnnnnnnnnnnnnnnnnnnnnnnnnnnnnnnnnnnnnnnnnnnnnnnnnnnnnnnnnnnnnnnnnnnnnnnnnnnnnnnnnnnnnnnnnnnnnnnnnnnnnnnnnnnnnnnnnnnnnnnnnnnnnnnnnnnnnnnnnnnnnnnnnnnnnnnnnnnnnnnnnnnnnnnnnnnnnnnnnnnnnnnnnnnnnnnnnnnnnnnnnnnnnnnnnnnnnnnnnnnnnnnnnnnnnnnnnnnnnnnnnnnnnnnnnnnnnnnnnnnnnnnnnnnnnnnnnnnnnnnnnnnnnnnnnnnnnnnnnnnnnnnnnnnnnnnnnnnnnnnnnnnnnnnnnnnnnnnnnnnnnnnnnnnnnnnnnnnnnnnnnnnnnnnnnnnnnnnnnnnnnnnnnnnnnnnnnnnnnnnnnnnnnnnnnnnnnnnnnnnnnnnnnnnnnnnnnnnnnnnnnnnnnnnnnnnnnnnnnnnnnnnnnnnnnnnnnnnnnnnnnnnnnnnnnnnnnnnnnnnnnnnnnnnnnnnnnnnnnnnnnnnnnnnnnnnnnnnnnnnnnnnnnnnnnnnnnnnnnnnnnnnnnnnnnnnnnnnnnnnnnnnnnnnnnnnnnnnnnnnnnnnnnnnnnnnnnnnnnnnnnnnnnnnnnnnnnnnnnnnnnnnnnnnnnnnnnnnnnnnnnnnnnnnnnnnnnnnnnnnnnnnnnnnnnnnnnnnnnnnnnnnnnnnnnnnnnnnnnnnnnnnnnnnnnnnnnnnnnnnnnnnnnnnnnnnnnnnnnnnnnnnnnnnnnnnnnnnnnnnnnnnnnnnnnnnnnnnnnnnnnnnnnnnnnnnnnnnnnnnnnnnnnnnnnnnnnnnnnnnnnnnnnnnnnnnnnnnnnnnnnnnnnnnnnnnnnnnnnnnnnnnnnnnnnnnnnnnnnnnnnnnnnnnnnnnnnnnnnnnnnnnnnnnnnnnnnnnnnnnnnnnnnnnnaaaaattgacaacctaaacaataaaatatttgaagtgctaactaaagtggtatatatatcctgggtaatgataaagtgcaggaaaggatacgaacaaaacaggaaaaaacaacagaaaattgaacacaaccatctatttttccaacactggaaaagcacctacacagaccaaaatgcggttttgtagtcattgttcccttacctcacagaactttgagcatatcacaaaatgcgggaggactcagaccaaaacaagttacaccaacactggaaaagcacctacacaacacaaaatagaagatcagaagaagaaagagagaaatgcagaagaagacaaatgcaatggaggcgcacagacctagtgggagccgcggcgacgctgacagtggaggtggcgacaatggaactcagaccgacaatggaagtgaggcggcgacaatggaaccccaaaaccgtgattgtggaagcagaggcgcagtgaagggcgacagagagaagacaggcgcgggagtgagaatgatttttattttaatttttgggtatcttataataataacaacatcggttctcactttaaaaccgatgttaatatattgcccttaacatcggttttgctaaaaacctgtaaaactgatgttaagtcgtttccgttaacatcggttttgttcaaaatctgaaaaaccgatgttaaattattcctgttaacatcggtttttcttaaaaatatggaaaaccgatgttaaagtctctctgttaacatcggtttctcttaaaaaccttgaaaaccgatgttaacgacaacaacttaacatcggtttttgaggtttttaaagaaaccgatgttaaaaatgtccatttatttacaaatttgccaccgcgttttggttaacatcggttttcctaataaccgatgttaaaatggcgatgttaaaacctatttttgtagtagtgtgtatcaaggaaaatgctatagggacattcctattttaatttttttcacttattggacttgatgcgaattctcaatggaggatcctggagttccaacaaccatattcaaatcttagaggtgatcaagttaggcgacgttcttgatcagatacccttgtaacatgcaagtttctaggtacaagtagactatttggttgccaagttcatgaatctggcaatggggcaacatttagtgaactatattggttcctttatggagtacgatgagaataataactcaggggcatgacataagtatatgcaaatcaaggttcaagtcaatgttcatatcactttgaagaaaaataagaaggttaaaaagccaaggagagaatggagagttgtcaaattcatgaccaaggcgaaaatttatctctcaccttaatgctatggtgtcaaggttcttcaaagataaatatttctcacatggggatttcttggactcaaatcttggtcatagtccaagctttattcagcatagcattaagaccttaagggaactgataaaatatggcttgaggtggacagttggtgaagggtctcagatgaatatatggcaacaaccatgactcagacttggataattgctcaatcaatcaagctccacattatgcaatttcacatctgacagtgaaggatttattgatccctatgtccatatactgggactacaattaatgaatcttagcttcggtaccacaacaggttgttgattaaatccttccaatacaactgataaatgagtttgaggaagatagaaggatctagagatatactaaggatggttgctacaatgtcaagaatggatatagactctttatgaattattttgggggtattaattataatgctcgtgattgttgacgtctcatacttgtgctataacaccccgacgaatcacaccaaaaagagagggatccagaggctatgcatgtatgagattgtgtagttgaggatgacttaaaggaattaattgatactacctataccaacaagattcacttacttttctgtagcccatcacttaagaactccacggttaagtatgtttggcttggagtagttatgggatgggtgatattctagaaagttattggaaagcgtgtgagtgaggacaaagcacgctgaaaatcttgtgtaggtttgtgatgtcagtcattgatcttggaagcagacaaagttgattttcaaggtatcggaaagggttatctatgaaggattctgaccggtggaggattctgactaacattgatgttgagtgaagtactaccgtgtgaagtgtcatagtgaaaaagctgtcgataagtaaaaaaaaatacgaatatacatatacaacctctggatccctctcattcgggtgtgtatttgattcactcatgtatccctcctgctagaagcccgctaggactcactccttgtctgtgtctcaactcttttttgcaccgatcactccctaccttcatcaattcccaagattttacattaatcaattctatttggtgattggaatctgatatggaattaagttgtcccctggaagataaagcttttttcttgagcgggcttgcaggggctgcttacctaccaggattcagttacaataatgaggtattcattgtccctccatttgtttattctacgatcaagacttggagaattcctttcattattttttcgcgtgccattgaagtatgatggtatgggaaaaaggctggtttgtggttgttggatatttcctttttaatgcttggcccaaatcccaatgtgttgaaaagggatttgttgacttatgcccaattcccgaggggctgacctcggcccattccagtttagggtgctgaaatccctaaacctaattcctctctataaatacgacatttatagatggaggtggcagaattcagaatttcagagagtggagacaattctcgtttgagtgcagagaagaaagaacttttctgtgagtgagtatccgagaggttgagtgagcaactcttgtagagagtgtttccttcattgttggtgaggttgagtgtctccagcgaaaggctgttgaggttgtttgtaaccactattgataatagtggattgattctggactaggtcccgtgggtttttcctcttcatgttgaagaaggttttctcccacgtaaagctattttgtgtgtttttctcttttgttctttctcgcgttttgattgttcacgtttccgcattattctgatttgttctgtcaagttatgggactctattgaggagacacctgatgtggtctttgttcgagctaattcaatgttacaagattagaattttgctcaaaacactccacaaagatttcaggctcaggtaccaaccattttaatttactcgaagtggattaaactagcaatgacagttgtgaagtgtaatattaatgctttattttttaatgacaaaaggaaaatgaggtttggttgctacttgagggatgatcgaggcaattttttccagacctatatagggagaggcttatgctctactaagtgctatgaaatgggtggatctagggcggagccatcaaacctgtttagatagtgtcaaattttatttttaattataattaatatataaatatatataattattaaaagaaaaatctttcactaaataattgcaaattttattttttaggtagtgccatgaccatcgtaggccacaacataactccaccactaggtggatcaattgcgtttttatgcatttatttttgaaattgattgtaaagggctaatggaccaacttttgggtggtagggataattttacaaaatgttgtgttgttgaaccacattagacagttacttgactcttgtcttgcttatagttgccagtttattgtcgaagaacaaattctgtggctcattccttagcccattactttctagagaatcctaataatttttcttttcatgatgttccaacatgtattcaaaattctatattcatgaaaatgaattgattctctgttgtaaaaaataacaattatggtcatataagtagttctaaggtaactttattctaaattataacaaatatattgcataacacagtgttagcattgtccctgaaccaaaatataatattacttttgtctctgaatattagatttttttttcttcagattagtttatctctttatataagactctttttatattgtctttttcattaattatttttttaccaacatacccttaattattctataataaataatatgaattaaaaagataaatgaattacgtcttttataagaattgaaaaagaaaactaacacatattaactaattagattgaaagtaataattaagtggaaatacagaattgatgagtcctacaaattttaaaggtaatttttaaaaaataatataaattattaataaatttaatattactaactaaattaaccaagtttttaagtttttaaagggtgtgaactagttaaaaaattcttacattaaagaaagaagagaggtagtgtatatagttgccgcaaccccccaaagtttgaaggattggcggagagttggaactcgctagttaaatttaatattttataaatgttaataaatttaaataatactaaatagcaaactaataaattttaagagttaaacttatatttatatatttaaaattatattcatttaaaaatattatccatttatatgtattataaagcaatcaaaattacgtatattttttataaataaaaacattctgatttttatatataaatcttaaagaaaatttaaaaatactccttcatataatacttattaagtgttggtttttattcttttttcaaattttattatttgtaatcatatttttgttagttttaaacatttatttatattttttcattattaataactttatttttatttaattttaattgcactctagtcgttataatttttaattcacaattttcgtcttttgtttttttaattctacacatttacccacttcccgtcctaaattttaaacttaagcaatttcaatgttgttttttaattgatcatcctttacttaaacattgacttatgacttgacttgtgtataataagtgacgtggaagaatttatttttatatgataacaaaattggtgnnnnnnnnnnnnnnnnnnnnnnnnnnnnnnnnnnnnnnnnnnnnnnnnnnnnnnnnnnnnnnnnnnnnnnnnnnnnnnnnnnnnnnnnnnnnnnnnnnnnnnnnnnnnnnnnnnnnnnnnnnnnnnnnnnnnnnnnnnnnnnnnnnnnnnnnnnnnnnnnnnnnnnnnnnnnnnnnnnnnnnnnnnnnnnnnnnnnnnnnnnnnnnnnnnnnnnnnnnnnnnnnntctttttttattaccatttttagtctttattattaaataacaaccttaatcaatatcataattgtgatgttggcactcttcacatcattggaatttgataggataactatatgcaatttgtttttgagaaaattgtatttttaatttcttatatgttcaaaataattgatgatatcgtattagttgatgagtgattaaaataataatttataaaaaaataacattacatgtgactattttgttataaactggttaataacatgataaagttaatagagagtcaacattgttattatattattagttacttaacaacaaaaattaaaagtgactttaaggtactaaaattgattaattctatccttgtttcttctaagtaaaatgaagatttatatttatacaataggtcatcnnnnnnnnnnaatgttgttttttaattgatcatcctttacttaaacattgacttatgacttgacttgtgtatgataagtgacgtggaagaatttatttttatatgataacaaaattggtgagtagattaagtgatttaatatgtttttagcatatattatccttttcgttgttttatacttttaattcctaatttaaattttgaccgatcaaattttatgatctttttttattatcatttttagtctttattattaaataataaccttaatcaataccataattatgatgttggtactcttcacatcattaaggaatttgataggataactacatgcaatttgttattgggaaaattgtatttttaatttcttatatgttcaaaataattaatgatgtcataatagttgatgagtgattaaaataataatttataaaaaaaataacattacatgtaactattttgttataaactgattaataacatgataaagttaatagacagtcaacattgttgttatattattagttacttaacaacaaaaattaagtgactttaaggtactaaaattgattaattctatctttgtttcttctaagtaaaacgaagatttaaatttatacaataggtcatctgatttattattcttgacataccttgatgttttaaagaccttcatactaaatgaatttttgagtgtgtcaatagaggaagttggcttgggtgtacaaacttcccttgaattagtcgtgaaatgatataaagaataaagattaagaagttaataaactacacatttcaagaggtgcaaccacacaactcttacaacttcaataagaagtccactttattttatatgtggtgctacttatatatattaagtctacttaattttttttaaataaaaagatagaaactttcgatattgtaacgaaactataacaaatttaaaagtaactttatcaagatagtcaatttttaaaatgatcctaaagttgttaattagtcaactttcaacatgtacaagtgttaaaaaaatatattctgctcctggctatgttttcattcactttaaactgaaaaatagcccagcattgacatgaaggcaatgtgcaaatacttatatctttgagtgccttccaactcaatattggatgtgtgaaatcaattatcctatcttaaaattttttttgaaggtcacttggacaacaatcatgataattttacaaacacactatatttgcacaaattttattgtttaattacaattcatttatcttaactttttcaaacactacgctttgatttttctatgtacccattgaaagtgtgctgtaaatctcatgatatcgatgaggatatctacaaatggagggaagcagaagaggggagagactgtttttatgaatttttcttctttattttatgtagaaatcagatagggtgggacaaaaacaagacggttaaaatcgctttcgtttcatttttatttcctcgtaaatattaaggggattttaaaaggaggaaacttggtttataatttttaatcatataaaaaaaaatattttgaaattttattttatattatttttattaatacttataaaatataataataactatttcatttctctctctctctctctctctctcttttcttttgaataaaatcaaatnnnnnnnnnnnnnnnnnnnnnnnnnnnnnnnnnnnnnnnnnnnnnnnnnnnnnnnnnnnnnnnnnnnnnnnnnnnnnnnnnnnnnnnnnnnnnnnnnnntttttttctctctttcctttcttctttccagtaaaatctccctcacttcttgctttctttggagcaaagaatattaatattgtactccaaacattttcctgtgtctaacaaaagggcccttctaatggggtcctatggtagcttcctaaatcctaattattatataaaaattaaagaataaaatatcggaaaataagataaaaacaatcatgattaaatttcactattctaacttaacttctaagtgtacatggttgtttaatgtttagattgtcccagcatgatcgaaacctgaagaaataaaactttagtcaaatctcactctccaatgcacatgaaatctcaatctttctctcacattagtatattggtgttgaatataacgagaaggtgattaaacacaccaatagtagaaacaatttgacattaataataatgggtcacaagtatgaaaatatcccaacatccccccgtttttccaaacccatgtgggatattttttatgatgaaattgatatgaaacagtttttattgaaaatagtgactaatttttaatttttattgaggacttccagcacatataatataaatattttcctttttacacaatttattttatatctacatattaatcaaaattcaaaacttaaatcacttataaaagaacacaacttcttatcactagtcactcatgatgatgttgctaaagcctaaaactaattttcacatgatcatatcttgcaatgataaagtgcactagaaggaaccaaaagtctttctcccaattttgattaaacccaaaactgaccttgctcttgcgcttatagcattcaaattaaagaattactaccgtggaacatcccactgagtgggactctataaagagatttcagtttcacacataaggacaattacaataaaaagtttgggaacatttctttatgaaagtaaagtttaaccctccacgcaactctcaaaaagacattagcgtgcaatgttaaaacacactcccagcattttaaaccctaacatgtcagtgcgcgtgagcaacaaatagtacccagacgatcacaaattgtactgtactaattactttttcttttaaatactcattttgatctgcaaaattgttgcttgtcattaaatttgttattttatcattaagttgtaatgtttaaaaattaatttaataataaattatatttttaaaggacaaatttgacattaaattatcaaatttaggattcaatttgtcattaatttatcatattttttacacattccaagattaaatttaaatgtttgtctttcaaaaattaatttattaatgacacactttcatgaaccaaaataaatatttatccttatttttcctccattcttggatccactttcctctaaagcaagtgaaagagttaaaatatgatgtcataaggccatggtcaaaagataattgcttagaaagagggtttgcttagaaaaggagggtaaggtgtatctttggcatagaatctctgccattaacttccttttcacttagttaacctaactaattgtttctccttaccaaactaattacatctccttgatgctattcttagcactatgcactgctataaacgcattggtccaagctccaacaaccatgcgggatttggttgaaaactcttaaaactttgtgatttggttggtcataactgttttggaagttgccataacactatgattaaacgtgagaagaaacattgaggaagaaatgaagtatgggagaatagaaaataagtaacaaatgggtaaatttctaaattatttggattgacagaaaaatgagaaaaacaaaacatgtaaatagacatttacatgcttataatatatatatatatatatatatatatatataatgaaattagaaaatgctgtatttgtgtaccctccatatcgatccacattaagattcattttattcttattagactctttgctatttctccccattgaattactttactcttcctacattttcttcgctacattgcagtgaaaacattttgtgcaggtctcgtgtataagtttctttccttcttcgatcactttttgcactccgaacaaatgaatattcctcttcccttttcttaattccacaattgcctaaattgactgttaacaaagtgatctttgattcaaaaagcaaaaggaagaatatttaatatacttttttaaaaaaatatttaacggaacataataaataccataaatcagtgtctttaagcaagaccaatgttaaaatagtagtatttatattattcatggacaactctgttgaattgggtcattacctcattattgtgtttcccggggcttatgtttggtgtgttaagaacaagtacttatgtagaaaacttttacgtatggtgggtactgggtagtgtggaaaacaataatcataaagcattaatattgagattcattttcatttttcaccacacggatggagatcgcacactacaccatttttctttttattaagcacttgatttcgtgatcccgtgttaaaaattaaaaatagaaagtcttaattcaacaatgggtaaagaataaattaaagtgcaattggacattattgggattaattattgttctcatccatgaccaagacttatattgcggcttacgagtgtttataaacttatagattttgaagaacataaaagtaatcaagaagcaatggtatttttcttttttctttcttttttttcttttttgatgaggccaatagagaagcaatgttgccgacacttccctagtgttaaaatgtatctattgatccctttaatttcctttacttacggatctttccaatttcatatccaaaaaaatgatgctgcgaaatcacgtaaatttagccttggatcttgcttttaaatattcattggtttagctaaaagactgggatcagacaaaatggcttacaaatctcacttactccatctaaaacacgtgtttttgaatactttatttgcaatgcgtaaacaataatgattcaaggctcattaggcaatagtagaattttttaaaagtaacgacttaatttggtctttaaaaaattaactacttaactaagtttggtcgttgaaaacagagttataattatcaaatagtcctttaagattatttttgtaagacaatctagaagggttccatttaacttaaccgatgtgtccacatgacattttaagcaacgaaagtggcattctttaatttatgttgagtacaatatttttaaaatcccgttttcctattagaaacaacctagttcttttttatgcttagaaatcacctagtttaattcttagagaaaccactcaatctaattcgatccctaaaaaatacttttttttggcgaattttatatttatactaataatattaacggttgtattttatttatatatattttataaattatttacnnnnnnnnnnnnnnnnnnnnnnnnnnnnnnnnnnnnnnnnnnnnnnnnnnnnnnnnnnnnnnnnnnnnnnnnnnnnnnnnnncaatgttgttttttaattgatcatcctttacttaaacattgacttatgacttgacttgtgtatgataagtgacgtggaagaatttatttttatatgataacaaaattggtgagtagattaagtgatttaatatgtttttagcatatattatccttttcgttgttttatacttttaattcctaatttaaattttgaccgatcaaattttatgatctttttttattatcatttttagtctttattattaaataataaccttaatcaataccataattatgatgttggtactcttcacatcattaaggaatttgataggataactacatgcaatttgttattgggaaaattgtatttttaatttcttatatgttcaaaataattaatgatgtcataatagttgatgagtgattaaaataataatttataaaaaaaataacattacatgtaactattttgttataaactgattaataacatgataaagttaatagacagtcaacattgttgttatattattagttacttaacaacaaaaattaagtgactttaaggtactaaaattgattaattctatctttgtttcttctaagtaaaacgaagatttaaatttatacaataggtcatctgatttattattcttgacataccttgatgttttaaagaccttcatactaaatgaatttttgagtgtgtcaatagaggaagttggcttgggtgtacaaacttcccttgaattagtcgtgaaatgatataaannnnnnnnnngaggtcaacataaaaaataagacttaacatacacttgtaaatagttgataacacttcaaacaagaataaagttataatgtcatttcaccaaaatagactatactacgagagaccttgagaatcttgccaatctaagatctctataaatactactaatataactctttaggagagtttttattgacttaagcatcatagtacgttttgcatgtatccacttgtttttaaagtgttttagtcatgtctaaatgtagacgcctcaatgatcactcattagatttcaatattaaagtgaatccattagtcattagaaaagggggttaaatagtgacactgtaaactaatctggttattttacgcacaagcatactagcttctaattttgtttcttaagcttcttgcttgaaaatcaaaagacttataggagtaatttatttcccttacaagtacttggatgaaagtatattttcatgtaaacccaccaagtaatcttgttatttactactttagaacctattcataaaaactataaaatctgttgaataatattttctgcttttttatttttctttgttcaaagtaggtgttgcttaaatagttttataaaaaaaaccatttgattagaggtcaagattaaggttttcaaatataagattttttttaaaacaaattttaagcacactacaacaatatttaatgagaagcaataaggaaggaaaataacacaccaaagaattacaacggttcaccccaacctaggaaggaaacactctgtggtattattttttttcctgaagtctccataaataggctcctacaactagtattctctaagcctcaataggctccacctgagtattctttcgaaaagtctctctaagcttcaccctagtattctctaggcttttgcaggcactaccccaatattatttcataaagcctctccaagcttcacccttaataacactttttactagacatacacaacaacctgttgtgttcacattgaacttcagtagcagtagttccctaactacttttctgagttctttcctctaaacttagggggagtggacagacactcttttgaatttggttctagtggctccacctagagtgttttggctaaggaagtttctttagataaggggtttctctacctaacttttactttctactttggcaacccttccatgcaagttgcttcttcaaatactgttaatttatatacctgattatgagctagtttttgttgtgatcgttagaggttgaattcattttccaaatgttgcatgagttgtccatgttctcgcaactatatattatgctccaattcaacctctgtcatataactctcttgcgttatcttcttcatctttgctcttgctccactgtcagtcagcttgcacaatgtatccgttgaaggatctgttgagataaatctgttagtgctagatggtgtcttagtgacttctgcatgatttcgaattttgaatcatgagaatttttctagagattctttatgtagcatgttttatggagaagtaatggtattgcagtgcaatgtgctacaatatcattttctaattggttgttggttctttgaataggacatctgtcttctttgaaacttagacttcgttaggatcacaaggaaatacaatttcagaatcagtgttgtccaagcattgatgcatgtcttgacatgtgtttgcttctagattggtgagacatgtatattgtaacgacccaaaatatttctaggtattctattttagttggattattttttttaaaaaaaatcattaaatattgactattttatttttactgaatagatcatagtataaattcgatcatgtataatctatagatattgtcaaactcatatatatatatatatatatatatattaataaccacagtccgattatacataagtcatttcttttggttcctacatgttttaatacaacataacacttaacaaatagaaaacaccatagtcacactagtaggattattatttatgtacaaaaacatacaacccatttacttatttcagaagttctctccaaagctctcttcttcttcgctgaccaagttaattggttccataggtggttgtgtataggcaggagcgaactgtaggaatgagtcataagggttaaaaattccattaagtacagagacgggaaagtgagtgccaagataaatatatgcacatataatagggtgcatggttatgatataacagttcctttcttcatcgaggtaccattccaagtttagcgcatcaaggaatatgatgattaaggccatctaaaaacatgaaacaaattttgtgagaaataaaatttctcagtagacaaaactaaaccaccaagcaagttagtacgttagtaattcatcaatataataaaaaacaatcataaaaataattatgcaaatatatgaatgcatgaaatgaatttttccagggtgcacatggcctctacatatcgtactatatgtagctacacctcgtactggatgtagaaatactgcaatcatcttatgcaagtcatgcatgtcattccatgtatttgcacttggtttctacatctcgtactggatgtagtctccaactatgtttcacaaatctcgtactggacttggaaacaggaaatcaacatatcatcacatcaaaaaaattattccataagtaattatatactgtgtcttggatcccaacccgaccatcttagtcatcaataataccatctcggcctatcttaatcatcaaaattttaatctatccgggacaccgactcgatcatctcaaaaatcaagaatataatctatctgggatatcatcccggccatcttattcatttcaaaatatattctatccggggtaccaactcggtcatcttgattattgaaaatatagcgtatccgggatgccaacccgaccatcttaattattaaaaataatctatccgagataccaacccagccatctagtcatcaataaaagcatgtctgagataccaacccggccttcctagttatcaataaaaatctatctgggataccaacccggctttcttcgttatcaataaaagtctgtccgggttaccaacccggccctcttagtcagcaataaaagtatgtctgggatcccaacccggccatcttagttatcaaaagagcatgtccaggatcccaacccggccatcttagtccccttgaacatatcaccttactacttcatccttaaatttaataatttaagcatgtgaaccatttatctacataccattcaacctctacttctatcaaacagtgttagaataaaaatatgaacaaacaacccaaaaatcattacttttcttccaaaaattatcaaatatcattccaaatatcaataatatttcaacctatattcttcaaatgacatgaaattccagcctaaataatagtcataaatctgtacatttagacatgtaaattagtccaaataaattcttaactaaagattgaagcctaacctacctcaagcgagttttgattcttgaagaggaatggagtaaaggttgtcttccttgcgaaaatcctctaagaaagtggctgatgggtgaagtggtagaaagaaggcacgattaaagggaatagaaaagcatggtgcaagaaaccagtagtagtatgataggttttgaaagctgaagtttatgtgcaaaattttcttgaatgccaaggctatttatactgattgatttagttaggatggaaggtaattggttagaaagaaacttagttagtaattaattaagttctaggttaactaagtcattacaaactaagaaaatatctaaattttctttatctaatcatcattaccaatatttccttcgttaatggcattgtgcacgtggcatgcgtccataaaacgtgattagctgccacatggatagtcttaataagattactcaggaagcttggacttagattgtcttattctctttattgacttcaccttgactcaaatattccttctattagttcttcacttagccaagaatatttacattcctgaagcacgtaagaggcttaggacattcatgcacctttgattggtccaagttttagcttaattttctagcctttatgctaaagttttaggagttacaaattgccaagaatatttcatagcacatagttcgttagtccaaaaattctatccaacttccataattaaatcataaatataactcataatataattttgaggatgttacatctatcattactaaccaccttgtgatgcaacttatgatgatccttgagtcatgtgcaatttcttatatctactcattgacttaagttatccttagtatgatgcttttaaccatacataacttttgttagctgcactttgacatggaaaacatgactgtcttttgctggctcgacggtgatgattttcagtggcacatcatttcaagaaaaaaaaatagtagagtttctttcaattgttttcaacatccattatatatatatatatataaaattaaaatcgttgaacacgtgaatcaataaacacataattgttttaacttaattagaggtgccaagttccgatcttggtaatcaaagtaagagctttgctgtgtctatagtacatttgtttgtctcaaaaaatcatttgtctttaaaataataaaataattataactttatattaaaacaatatgaattatttaatatttaaataacaaccattttgttatacctttgttgcatatagggttgacaaaatggttttgaagggtcaattaggtctagcacatcaaatcaaatagtgaaattgaatcaattcagattcattttatattcttttgaattgaatttttttaggcccaaccctatatcgtgctgttgggtcaccaaacttattcagactaatttagaaatcaataaaacaaagctaaaaattgattctatttaaataaaatataataaaaattctaaagacaaaaattgtttattatttattatgccgcctaacatttattggcaaaaccatttaaattatgtttaatgaatatgttttatgaatactcaaattaataatattggtttaggttatcacttcttatggatacttattttatgtttaatgaatatgttttgtctttttaaaacaatataaactggaatataaaattataaatgatattaataagttactatattttatttaatatttattatatattactaatttctgacttgagtccatttgaattatcagattatatgggttgggccaaaaaaacttgtttctatttaatttggacttccttttttagtccagtcttaccctaattatgggtcggttgagccagcccattggactaggtccattttggctgctctaattgcactaaaacattgcataatccaacatattattttgaataggaaaatagtaataatacattatttcaaacacattctttatcatttgttaaaaattattaaattttgtagatttcattttttatcaaatgaatcttactcataaattaatggcattgtgcacgtggacatgcttccataaaacgtgattagctgccacatggatagtcttaataagattattcaagaagtttggacttaacttgtcttattctcttcttattctctttattaacttcaccttgactcaaatattccttctattagttcttcacttagccaagaatatttatattgctgaagcacgtaagaggcttaggacattcatgcacctttgattggtacaagttttgtcttaattttctaacctttatgctaaagttttaggagttacaaattaccaaaaatatttcatagcatataataatatactttatattaaaataataatataattttaagggtgttacatctatcatcactaaccaccttgtgatgtaacttactatgatccttgagtcatgtgtaggttcttatatctactcattgacttaagttatccttagtatgatgcttttaaccatacataacttttgttagctgcattttgacatgaaaaacatgactatcttttgctggctggatggtgatgattttcagtggcacatcatttcagnnattatatatatatatatatatatatatatatatatatatatatatataattaaaatcattgaacacgtgaatcaataaacacataactgaaagtgcatgtgttttaactaacaatagaaaaataaattaaacctagaaaaataaagaatgtgttacctctttagaattggatattatttgaaagttcaagtgagattacgacaagtatagctaactaatcttctattaataagttatctaaaaaaattcttctatttataagtgcatgctatcttctgctaatcaagattcaaatgtttgttacgtataacattgatattccctgtctatatatccaaaagatgataatcaaattggcatatcgcttcttaatcaaccttagatatggaatcatacgtcaacatgaggaagtgcccaagacaatcacaaagagagagaatggatatggaaagcaaaatttgagataggagaacacccttttcatggctaactggatacaactttgaaccacaattcaatatcactcaccaacaaagcaacaactaccacagtctcaataaataacaatttggaccaaaagagggatgagaagctacatgaaaaaaactaagaacaattgatatcagtggtagtaatttgtgccttttagggttcaaattctggttgatctttagatatgaaataaatcatgttggaaggggaatacccaccttgtgtttcctcaagtctttgacgaatatttgttactggtttcgacggaaataacttcttaccaataccgtgattaaaaaaaagcattaagcacgaatattaaaagcataaccccacttcctttgacaagttgatgaaacacaaacactatttaagttttgaagtctaaacttttgaggctaaaacacatgatcatagaagaaagttacgttgcttgctagagaaacggcttaataattgcccttgaacaagtgccacatgtaggcgcaaacatgtttaagccaaagttgctttcaacatagacataaaggcaaacttatgaccaaggaccctccccatcacatgcctctcacatgcccttcattaattaaatataataatcatactaaaggagacgacttagaactagtagtgagttttcaattttttgttggataatcaaacaatggatttcatatgcaaaattctactctcataacatttatcgtatagacgggaaaaaataataaataaatgaaaaaagtcaattttatgatatcaatcttatatcattattaatttattaataaactttgttgtttatcattcatattataagaaatataaatgaaaaaaaaacatgacattaaaaaattaaaataatgctgtaattattttaagacttactttttttccttatacaaaaattattataggacggaaggagtgtgttcacgtattgatattagtatttatcactgtccttttttttttttcaggactctcatgacgtttaattgggcagggttaattaaacgtaaacttggcaatgctattggaattatcaagtcaaccaaaataaacaaaacaccattacgtgcaagatggtaaagcatgattttaattaattaattaattggatgcttccatcagccacgatttatagataaataagtaaattaataggggatgaagaaaatgtaaggcaatgtgatataggggacaccttcattccatatgtggcccttctctacctcacaatcttctactgataatgcctcaattatttatttatttatttattttagggggggttctcttaatttttttcatcttctgggtagggtttcagtctcaagttttggcaaatagaaggaaaatgacattggctagaacatggctattgtgtatggagcccttcacaactattaatagcaatgtgtggttcctgttgtgcatcaaatttgtgtacacaatgtgcaagtgcatgtctagaaatttgagcagagcacgtgaaaaagctagaagaatggtccctcctacagtgggccttgaaaattgaatgctccataacactataaaaataaaaaagcagaaaaataaacccttcaattaatggtatgataaattaggctacggggtcctatggaggatgtgatggtgaataccataacgcggaaattggtcccgaaatgtaatgtgggtttgatagctacatgatattgttatcaattttgctaaaatataatatacctaatgataggagtttggacctatactatacttgtgtcaaaagtgatatctgattataagatatttttaattaattcgtgtgctttaaaaaaattggtttagttaattatattaaatttataaattatttgtattatcatttcaaaattaaataaatttttggttcttataatttaatatatttttttcatttttgtaacttttttgttttaatcattgtaaaatgtgtttattttatttttcatctttaaaatattttagataatactttgaaaaataaaaaaaaaactgttttaaacagtnnnnnnnnnnnnnnnnnnnnnnnnnnnnnnnnnnnnnnnnnnnnnnnnnnnnnnnnnnnnnnnnnnnnnnnnnnnnnnnnnnnnnnnnnnnnnnnnnnnnnnnnnnnnnnnnnnnnnnnnnnnnnnnnnnnnnnnnnnnnnnnnnnnnnnnnnnnnnnnnnnnnnnnnnnnnnnnnnnnnnnnnnnnnnnnnnnnnnnnnnnnnnnnnnnnnnnnnnnnnnnnnnnnnnnnnnnnnnnnnnnnnnnattttatttatatatattttataaattatttacttatactaataatattgacataagattttttttaagtttgatttcaatagatattgaattattttattgcaaataacaatattttttaagggaatattaagtttttctacttattggttattttattacaaattataattttttaatattgattttctttatatgaaagcaagtttcgttcttactattggtgcatgttttgctataagtgctatcaattaaaatttcaatgtggtcctcaaaaaaatataagtgtgtgttattataccatatctttaatttcattagttatgatatgttatgaaatactagttgataagtaacttaattaattaatttttaacttgatgatccgaattttaaatttgtgtggacattgattatatgacaatagattaaacctcttcttcatgnnnnnnnnnngatatttttaattaattcgtgtgctttaaaaaaattggtttagttaattatattaaatttatgaattatttgtattatcatttcaaaattaaatatatttttggtccttataatttaatatatttattttttttctttttgtaacttttttgttttaatccttgtaaaatgtgtttattttatttttcatctttaaaatattttagataataatttgaaaaaaaaaactgttttaaacagtaaaatgatattatttataaaactttttttttttaacaaaataaactaacggaaagaagacaatctctaccccgactaaggtcattcccagattgagaacccaaactgcaatgtccaatttgggccatattttgatggatcaaatccagggatgaaagtttggcgttgctattctcatctcagcttactacttgtgatgtcagttcaaaattccacaaataccattttgatggaaatataattccattgaactattatacaacagaaatatgaaatcatatttttgttttttactaaatgggtaataaaaatctaaaaaactaaaatttgattctgttgacttattatacatcaaaatcatgtttttgcagtttaatttttttaacccctttaattaatagcaaaaatataatttcgttgaactattatataaatgaaatcatatttctattgtttaatttctttcaccttatttactaaaatggaaacatggtttcgtatagaaggatacataatggattcaaatgggaagcaacacaccagagcagagtcaatcaatggctctagtttgacttccatgggacttgaatctactctactaaataaaactgcaggattttgccaggaacatgtggaactaatcattacaagcaatttcagagccacatgtcctctaatgggactaatagttatccaggtgttaaattgccaaatggtggtggattgaacattaagaactcggtgttcgtgtaacacttgtggcaacgagagatctgaagcgagtgcgcttcaagaaataaaaaaacaacatatacacatgaaagatgatgttgcttggtacaagagggtgagagggggttgagaagtatgaggggaaggagagttggtgtagagatttagtgagtgagtaaaagagagatttcacatgaatttcataaagtatggggtgaaaatagtaacaagtgggttgaaaatagcaactaaaaacagttgattcaaaagtaaacatgcacagaacttaatctatatcctaattaaatcaaagttttcatgtttacgtttacgggtaattttttatgattatgatattgatatgaaatagtctatgatttatttcacacttaagagtcaatttaaatttaaattctaagttacttgattaagaaaatataattcgttattatttatatcaattattgttgattgtatatttagtgtcaaagtgtaattttcttcatttcacaaacaatataaaaagaaacttcatttaaaatataatactcagcaatatgcatttttcattgacgcgtgaatcatgattcggtttttacgagcgtcacaaactcacaataagtgtccgtaggcacaaggtaattttcttgtagtgactgtcgacagaaccgtgtatccctttagtttaactcaacgagcaataattttcttttttgttagactatcataggtatttctacttgtgacaaatctgtttgaattagaatcactataaattatattatttatatagcgtaatttttaattttataacactttttatcactaattttttcctcaaattctgttcatcactctgttaatcttttgtagtaattctctctttctcttcatatatctatgataactgtatacattttgtacaattttgttgtacaaaaaccatttctttaattgattaaacgagtaaattattatcatatagtactgtgttccatttctttaatcaaatgccaacactggaattcctatctcctgaagtgtgatatcatgtaattgtcttgtaccaggcaaagagctatctagtccacgtaacaggcctcagaataataataaatagcctttaccaaaaccactaaaacttattttgctactcgtatctgtacaacatcgtgtcacagaatctcttttcataacccattgctacttttctgtgtatgcattatgcatcccttgcgttaaataactcggcgtaagagtcaaaaattaatttgagaaccaaataaaacaaatatttctatatgtacggacataagattgaactcttcaatacatatttaatgataaaattatctttcaatcatttcatatcatattatatcgtgtttattgttaaatatataccactacgtaatgtacatggaggatcgaataattaaaatatatttgttatttatataacctctctgcaggttttgggataaaccgaaaaaatcaattaaatcttatgaaagaaaatggtcactacctagaatatttatattgttacatatattataaaattaaggctaaatagtcattttcttctttgaatatgtagagtgtcgacaaattcattcctgaaagatgaaaattcaaatttttgtccctgaaagtgaaaaaagtgcgacaaattcatttatatgttaactttggtatatgtggcatattcatggacgaatttgtcagcgttctacacagttatggtcgaatttgttagcgctccacccaaaatataatttaatcttcatattctttcttttttaatcattacaagcataaaattataataaactcttaaaaattaggaaaacaaacataagttaaaacaaacataataataagcataatattgattaataagcataatttgtatgttgctctgaaatttctattataacaacatgaggtaatgacaaaatcaagttgagtctcattttttttaagaattaatttaatgactgtgcatttttgtttgagtctcatattttagataaggtactgtcacactaaaaatttcaaagcaaaaatatgagataataccttacccaaaatatgatactcaaacaaattaaaatgcacaaacattaaaataatctttacataaaagtgagactaaagttgattttgtcactatctaatgttgtcataatagaaatttcaaagcaaattatgtttattaatcaatattatgcttattattatatttattctgacttatgtttgtttttttagtgtttattgtaatattatgcttgcaatgattaaaaaagggagaagatgaaaagtacattatatttgggtagattacggataaattcgtccctaaatgtgtgagcgttgacaaattcgtcccttaatgtgctacataggctctttcattaacagtaacatatagaagttaacggatggatgaatttgtcgcacttttttcacttttaggacaaaaatttgaattttcatcttttgaggacaaatttatcagcgttttacacattcaagaacgaaaatgactatttacctaaagattaataatactaagaatctcatatatatttttgcatattctgttgtatatcccccacccccggcatgttacactaattaaacattttagagaattaagactaagcataagttgcataacgctcacaaagtagcgtgcctcatgcttaggtcaagccactttaatctttacaaacctaatccactatagaacctttttctctttcgaatatattaatagtaaaatcagtgttacatgctgccattcaagtatatataagagagtaccgtttctgatacttgttcaccctagagaagagaatctaatttgaaacaaaaatgaagaccagtgcagttgagtctggtgaaatttcaaaaggagcacccccaagaaaagggttgattagagggctctcaataatggactttattttgagaattgttgcagccattgctacactgggaagtgcattgggtatgggaacaactaggcaaacacttccattttccacccagtttgtaaaattcagagctgtatttagtgatcttcccacacttgtgtaagtggtcattctttaggttaaattgttttttagttctctaatttatttttagattcaatttggttctttagttttttttttctagttgaatttggttatctaatttttaaaatcgattttaaaaattagatgactaatttgaacttgaaaaaaactaaaagatcaatttaaacaaaaaaaagaattaaattgaatctaaataataaattataggataaaaaactaatataaccttctttttattagagattttggtatatatgccttaaaataatgttttttttactaagaataaaagtttacaataagggtgagaaatatgtaattgcaggttttttgtgacctccaattctattgtatgtggctacctagttctttcacttgttctgtcattctttcacatagtaaggactgctgcagtgaaaagcagggttctccaggtctttcttgacacggtaaacagtgattcttcttgaattttcaagccatagaatgtagttccaaatttaggcatcaatttggttacttgggaaggttttgttgaatgtgttaacctttcctcctctttatttagctatgttaaatttattcttttaaattaggcttagttacaccttttacctttcaagttatacaattttgcaaattttgtcctctaattttattttattttaaaaattttatcctccaatttataagatgtagcaaattgtactatgatatcaagtatccatcaagtcctaaacgacataattatttttcttctgataaacaaatgttaattattagtgtattaattttttgttagcggaagatttggactcgtaatctatccctcctaaacgacatgatgatgtggccattactttacaatagtttcgagccgtaacattttataaattaggagacaaattcgcgaaaacaaattttgggagacaaaatttgcaagattgtataactttgactgcaaaaatgcaactaagcctttaaactatcatgtcagtagtactattttctatttcctgaagcaaaattgcctgcaaagatagagcttcagcaacattgaactccttaacttgttagatgttactgccaaatgtttctaatgaagtttagtttaaactaacttttgaaggttatgtatggtcttctcacaactggagcctctgcagcagcagcaatagtctatgaagcacactatggcaactcaaatgccaattggtttccattctgcagacaatacaaccacttctgtaaacaaatttctggttcactcattggctctttccttgcagtagttctcttcatcatacttattctcatgtcagcaacatcaataagcaagcattaataattggtacctattgttatattcatgtgaacacattatattttcctttttaataaaattggtgatgacccttctatatttttcataaatttcagtggtttcgactcgcggccttatgcagacacactgtgacatcacaatatttctgaatttgtttagtagagtttggttttggtaaaaaaaaaaaagaaaagatgattgccatggaaaagttgtggtgtaaatagctcgctctgaatctgaatgtgtttgtctagccttttctgcaatcatattagcttgaagctttcaatataaagcagtccaaagactctctttagtgcaaaatccctgtctaattatcctataatttgttttttttataagaaggagcagaggtagtatcttataataattgcgagctttgagtggcgaatattttgttacgtgtattgtagctctttgttcttctttgttcaatgttcatgttcaatagtcacgactcatggcctcttttgctcctgaaggtgtaaaggaaatactttatgctttttttttttacttttacattaactatatctgatttgcatgtattattgtaagcaataatatgatataaattatattaaattgtaagaattgaatattgttcatagaaattgaagttagttctcaattcacaaagacaacttttaataagaattttcagagagtaaggatttgtttggttaagagaaacaataattaaaattgaagaaggcaaaaagaaaaaatgatttgtttatgaaaactttgtagatcaagatttaagaattaagaacatgcatgaaggaactaactttactaacttactgagtctgattaaagtattgggttgaatttcattctacttcacctgtaagttctaaattgaaattaattcaatttgattttaattaacatattaaatttataaatttattcagatcctaattattttgataaataatattttatctctgattaaaattcttaatttctcaggtgacttcaaataaaaacaaccgataagaacaatctataaatctgaaaagtccaataaatcaatttttattcaatacccaaattattatagaccaatctcccctcttgccaccattacacaagtcaattttgtaagatccaataataattttatatgactctttccaattatcttgccaacctgagcccattccaaaactccatcatggccaacctatacttggattgacttaataatgttgaccttgttatgtgaacctactaatttatttcaactggtcatgagtcacacatgattataactaacatgtagaccacatgcaccttaagaacaactctaatgtgaaaatctattaaagtttatttatacaatttttaataataatttacatttttctataatgtcacattacatgttttattttaagtaagttgttcaaattttttctccaaccgaaaaacttattaaactttttcaaatgaatccccactaaataaaaatagtattatatttttaaggagagaaagaatactatattattaataaataaaagatgacacatttttaggagataattatttgctatagataataacccaacaataagttggtcccacaggattgttctccaatggtacaaaactaactcatgagtttctatttaccgttgtattggaggagaaatttccattggcgttgctcttaacatctaactacaagaacatcaatcactatataagaacatctctcatcatatatgatctaacctcactttttacactctcatcactccatgaagacatctcttatcatatacgatctaatctcattattacactcttctcatactttcattaacttgagcatcagagtccttacaagtaatttcactgaattttcctcattatcataccaatttgagctctacctttagatctctcattgaacacaaatcaaatattcataatatctataaaattccactcaacttcagcaatagaaatttaactaaacatggaaataataaaagaaaacaataaaaaggatagaaaaaagaagaaaatttattaaatcattgaaaagacaagaacttccatcctttatccacataactcccaagagattctgaagagaaaagtttggttggttatgaatgaaaatgctccaaagatcccataaaagcatagtgcatgtttttattctcaagggtattttttttttggcacttccagaactattttctgcactttctatatcactttcagaataatcattctggaagtaatatgaaaagtgcaaaaagcaatttatggaatgcagaaagcaattttttactctcaatgagggcgtggaacagtatgttgtgggtgtccaacacttacaaaatgtattgtataaagacacgtggtgcccaacacatgttgtacactaacatcacaatttggttcatgggccatagcccatagcgtcaacattccaaacttaatcctacaatacaaaactagcttctaaagtgaaaagtataaacattacaagaattacattgacatctttaatagacgtgagatatcaataatattaatactcatgttaattttctttagaactcgacaattgtgaatcagatatattgtggtttagcaaaatggaagaacaaaattatatcattggcgggtagggtatgccctcatgagctcaatccttacttctattcctttgttctttctatcattctttaaaatgccaattggtattcacaagaagattgtaaagaaacaaagggatttctttggggggtggagaggatgggagaaatctcctaaccacatcatggaagatgcgacaggtggatatgggtgaatgattgcttaggagatttctcagttaaggctgcattttcagttattcaagaactgggaataggagatggcgaggaagttcaatggaacaagatatgagacagtgaaattccaccaaaaggagcacacatgatttggagggctatggtatatagaatgccaactagggacaatctgctgcgtagaggaagtaatctggttaacacaaactgtccaatatgtcatcagcaggaggaatcttagaaccatgtattgcttacatgtaagggtgcttatcaaatatggtggaagtggttatccgtggttgaagaacaggctgcttttccaaattcactacaggggcacttcttgcttacactggctaacattagatttaagaacagctaaaattaattgaggtgttataatgaaatatataatataccaagactaaggatatgaataaagaaacttatttattcaaaaataagaagaaaaaaataaaataaaatttttcatatattcaaattaatttatgcataaattaatttataaaatttttatcattttttaaagaaattataaaagagaatttttatacatcaatttatatatgaaattaattttagcttttattattttatttaacaatacttttgaataagtttatctaaatatgtcctaaacaaatagatcagaggtttttgagtgttggacttgaagtccctttttatgcataataaaagaaaaacttatgcaaacaatctgacaaaataaatgcttcaacaattagtttcttatactattaaatggtagaccagactaatatatttgataataaaataattttggtactggttataagatatatatgtctcctaatttatttagagactataattttatttacggtatgtaattatcgctgatttaataaaattttacatgataaaaattaaatatgaattttttgataaataaattattctcactcttccaaacctaatgtgtacttacactatatcattgcgtaaaatatattggttagttgttagtaatttacatatgcgtttaagctcttccgaatttcttcgtttaagacatgcttaatctgatctacttcgtggtctaatccaataccttgggattcaactaattagataataacacattaatgtaaaatatgactcattcaattcattttattctaaattctagttcttacctagtttgactttcagttccatgaagaagaaaatactaggattagtacataattaattaaaaactctgaaatgtgtcattatcagtccgcttattatttttatttttatacaaacccttaaatattggccaagcacaagccaatctctgagacacgcatttcattgttttccacgcggttcaatgacctttgtttttttcaatcaacacttccgtcatcttttggataagacaaagtacaaagattcatgttagcttagaaaaaaccagtttggcatcaattattgacatatagtagtgcagaatttgccaaatatatccttggtcaaaataattaaataaattatcattgtattatattatatacaaaaagtgatcgatcatatctagcttcacatgcttccaaagcatgatctaagcatgtggcttgaactgaatcaagataaggaagataattccagaagtatgaactttaatttagaggcagttaattaactcgtccttatttacaaatactgtcaatgagacattgaaaatccaatttttaatataacagatatttgacatacttctacatagaatctacatgatattttatagatgatacttatcgtcatgactagacaacaatccaagctctttttttctattttttttgtttctttttttttcctattggttttatcctagcgaatcatacatttgtttcacatatatgggttggtcaatggtgctactctgtttcacttggtacttccctgaatctgcttcataattgttgttcaattcaaccggttgaagagatttcacaaaagggtgtaattcaatattggcattgttaatttgaaaatctaaggttgagcaataagagccatcagataaaattggacccaagtaattcatatccaaaaggtaagtaagggaccaagtcctgggaaggttcatcattttctgttcaacatcatgatttgcggctgcaagattagcaatttggactttaggctgtgtctctttgtgctccaatgcctttaccatgctcttcttcttatagatcctgcacaagacccagtcatccagctgatgacacatccaacaacaccaagggaatgtcaattatgaagcaacattgaataacaaactatattgtagaagttaataaattgttcacgtcagagaatgtcagaggaaaccctaagtttgagtgtctcgagaatcctaacacaaacttaggatctcctcagtaggcggtgactatctctaacgtgaacataagtaacaagaatgtggcaaaggcttaaatggtttaccctcatggatccaattttcctgctagatggtatgtttgattcagccaatcgatactcatgcatgatccaatcagtcttggcaccctttggtggcctacccttgtaaaagactaaagatttcttcaaccctacatgcttagatccactgtggattgccttgtctgtgccagtagccttccaataccctgacacggttgctcggttaggcctcaccccatttgggtacttcctgtctcttggactaaagaaataccattcattttctccaaattctgttttatctgcattccagggtaatttaataataagtgttagagatgtaatataataccattcatgtcaaggtttttaaaaaacaatttgcaactacaatttcagctgcaaggtcaaggttttttggcctctctatgactgcaattgtgactatatcacccatttgttcgtaatttatcttaatgttaaggattgcgacaaaaccttcaaaccttaattaatgtatcttcacttgacagtttaagatttcagatttctgttttgacatatggtactagaggctttatgaccaagtggtttagaatttaatccttgttgccccaattattctaataaaaaaatttgaatttctggataaggtaggcatgcttgtacattattcatgttttaaaaacaaagagctcattcatgaaggaacataatatagagatgcaatataaattgggattgttagttaatgacaagtgagtcatgcatagagacattataatggtgcaataatatacaaagttatgcataatataagttaataacaaagctaataatttggcaagtgatgttacaattaatatacctggcaattcccatggatcaaacttatagagattcacttctgggatgatcgatgcagggcatggctttgaggtggcttggttacaaaggtaatacacaatcagttcctcatccgttggatgaaacctaaagccaggggggagttcagagcttgttgtgccaccctccattgagtccaaaatatcaatttggtttggtagaacaaaagaggaattattatttttattattaagtgaaggaaaattggagagccttcaagagaaataataatattgaaggggtttgaaatgtttgcaatgagactgtgttccttttatatttgaaaggtggttgttatttgagtggagcaattccaacaataaggtgtaaaatattttttctttaaatgtgttggacctttttactaacatattcaatcattttatcaacatattaggttattttttattttataaatattaataataaatatttttaataataaacttaaagtataaattttagttgttttatccatgagtggagttgcatggctatgattggacgaatttttcatattcctagtacatgtgtcacctggtatgcatgcaccaatggggggtcagaactgtttcacacgtatttctgttactgacttttgcacatggttctttgaatcaatgcttgcacgtctatatccatattgagtaatattattcaattctctattggaatgttattgcagctttatatatattcccacataatattgtgtagtaagcagccaaactaatagttaaaaaatgagaatgttttcaccaaactaatacatctttgtttggtccatgcaatgatcgttaaagaaaaaaatagagtagaaaagttggtctttttgcttttttcttttttggtggaagtatgtgactagaaatgatctacttatctcttgagagttgtctacttgcatcaagaatttgctgtggttataaagattttggagtgaaaattgtcgctagtagttttttactcatctaatcgcgcctgtaccttgaatattggtaatgaatacaatttagttagatgtatgaatatgattaggtttaatggataaaatgtgcttttagatctttcaattttttgtcaaaattagtcttaaatgtggaaaataagctatcagtgttttttagagtttctgtattaaaaatacaaaaaaaaaatcaaatagaaaaattctcaaaaatacttataatttatatttaaagaaattcaagttgatcttcatattttctttttataattagtaagttttgccccctcagtttcgtattctaagatttataaagaagaacaagattcattcattataaaatatagaaaaaatataaaataaaataaaactaaaaatatatgaactaagattaatttaaatagaaaattaaagaatctaaaacatatttatccaaattcaattttaattttctattttttggatttagtttcataataaaaaaatgataatttatatcactaaattgtgatatggtatgcatctaaccatatctcttgtttgtgactcttataggttagcatcacatgcgtgtgaagtatctagatacatgtcaagacattttaataaaagagaaattaagagatataaatnnnnnnnnnnnnnnnnnnnnnnnnnnnnnnnnnnnnnnnnnnnnnnnnnnnnnnnnnnnnnnnnnnnnnnnnnnnnnnnnnnnnnnnnnnnnnnnnnnnnnnnnnnnnnnnnnnnnnnnnnnnnnnnnnnnnnnnnnnnnnnnnnnnnnnnnnnnnnnnnnttagaatatccttgcaatgcattaataaattaatttttatatcaaatcaaatcaatatttatatttttaattatttatcttaataaaaatattttgagtttctttaatgatttcaattttcttccatcaatactaagtataatcaaatatttataaattattattaaaataatattccattaattaaaataattttaaatgtttttatgattaaaatttcaaatatttatatttgttttttattagtagtaaaatgtttttttatttttaattgtattttttcccatttcatgtatatatttattgatactatgtaatgcataagatttttgcaggtactggtactccaacatttaaattagcttgctaaaacttacaagttggatcaatgtgataaaacatatttaagtattaatggacctagtataattcaagtcgaaaaattatccatctaacctagagtcttaaaaatgttaatattgaatagtttaaaataacttatattgaaatttataacttatcgatgttcaaaataaacaaataaattctatagattttaaaatgaaagttttaattaatagatacaataattaattataaacttaatcgcatcaagttgaatgaaattaaggcaaaaattaattttctctaatttcatcaacttaatacatgtgggcacaagaggatcgttaaaaacatgatcacttctcttatataaattctctcaaaatatgattaaaatataactatctttaattttacaataaactagtatggtgacccgtgcggacgcacgggtccgcttcgctacgctccgctacacttcttttaaattaattttaatttttatctttattataactaaaaaaatattttctgatattattgataaagtaatttaacttaattaatttttattgtcttataacaaagaaccacaaaattattggacgcacaaataaattataggtgtagatgaaagtaaaactatgtataagaaaaacaaattaataagtcattgtaatgacaaatatatcgtgttgttccaaaacatagtctttggagattaacgtataaaaaaaaggttagaaagaaagagttttagcttagatagagttaatagatgatcatcccataaatcaaagtacatcattacctattggatcagagaattcatggatgaaatccagatttgttattaatttaacttaattaacttttgttgtcttataacaaagaatcacacaattattttatcataaataaattaactaaacataattatgatggttatcataacaattgaattaaataaaaaaatttaaaaaatttcaaatcttgataaaattaaaataataaaattataaatagttttattttttaaatatgtcatcattgcatttcacccattattttatatgaaaaaaatttaaaaacaaaataatatatttaataaaaataaatattgtttattgtttaaaatgtaaatgtgttaaatactgttttaacaaaatctttttccccttaatagttcactcctaatgatcgaaagaataattatttttcataaataataattataatttctatcataaaaaaatttaaattaaaatcaatttacattatgatataatgagtaattaatttaaatttgtcttttaacaaaaatcatttttacaaatttatcttagtttttatctctatcataactcaatttttttatttatgatattattaataaagtaatttaaattaattaactttggttgtcttataacaaaggatcaaactataattttctaataaatatattaattaaattttattatgctgtttattataagaattgaattaaattaaaaattccaaaatttcaaaattttgattaaatataaataataaaactataaatatttatattgttgattatttgtatgtaactttgttgaatgtttcatttacaaaatttttttcctacaacagtttatctcatgatggtctaaaaaataattattttnnnnnnnnnnnnnnnnnnnnnnnnnnnnnnnnnnnnnnnnnnnnnnnnnnnnnnnnnnnnnnnnnnnnnnnnnnnnnnnnnnnnnnnnnnnnnnnnnnnnnnnnnnnnnnnnnnnnnnnnnnnnnnnnnnnnnnnnnnnnnnnnnnnnnnnnnnnnnnnnnnnnnnnnnnnnnnnnnnnnnnnnnnnnnnnnnnnnnnnnnnnnnnnnnnnnnnnnnnnnnnnnnnnnnnnnnnnnnnnnnnnnnnnnnnnnnnnnnnnnnnnnnnnnnnnnnnnnnnnnnnnnnnnnnnnnnnnnnnnnnnnnnnnnnnnnnnnnnnnnnnnnnnnnnnnnnnnnnnnnnnnnnnnnnnnnnnnnnnnnnnnnnnnnnnnnnnnnnnnnnnnnnnnnnnnnnnnnnnnnnnnnnnnnnnnnnnnnnnnnnnnnnnnnnnnnnnnnnnnnnnnnnnnnnnnnnnnnnnnnnnnnnnnnnnnnnnnnnnnnnnnnnnnnnnnnnnnnnnnnnnnnnnnnnnnnnnnnnnnnnnnnnnnnnnnnnnnnnnnnnnnnnnnnnnnnnnnnnnnnnnnnnnnnnnnnnnnnnnnnnnnnnnnnnnnnnnnnnnnnnnnnnnnnnnnnnnnnnnnnnnnnnnnnnnnnnnnnnnnnnnnnnnnnnnnnnnnnnnnnnnnnnnnnnnnnnnnnnnnnnnnnnnnnnnnnnnnnnnnnnnnnnnnnnnnnnnnnnnnnnnnnnnnnnnnnnnnnnnnnnnnnnnnnnnnnnnnnnnnnnnnnnnnnnnnnnnnnnnnnnnnnnnnnnnnnnnnnnnnnnnnnnnnnnnnnnnnnnnnnnnnnnnnnnnnnnnnnnnnnnnnnnnnnnnnnnnnnnnnnnnnnnnnnnnnnnnnnnnnnnnnnnnnnnnnnnnnnnnnnnnnnnnnnnnnnnnnnnnnnnnnnnnnnnnnnnnnnnnnnnnnnnnnnnnnnnnnnnnnnnnnnnnnnnnnnnnnnnnnnnnnnnnnnnnnnnnnnnnnnnnnnnnnnnnnnnnnnnnnnnnnnnnnnnnnnnnnnnnnnnnnnnnnnnnnnnnnnnnnnnnnnnnnnnnnnnnnnnnnnnnnnnnnnnnnnnnnnnnnnnnnnnnnnnnnnnnnnnnnnnnnnnnnnnnnnnnnnnnnnnnnnnnnnnnnnnnnnnnnnnnnnnnnnnnnnnnnnnnnnnnnnnnnnnnnnnnnnnnnnnnnnnnnnnnnnnnnnnnnnnnnnnnnnnnnnnnnnnnnnnnnnnnnnnnnnnnnnnnnnnnnnnnnnnnnnnnnnnnnnnnnnnnnnnnnnnnnnnnnnnnnnnnnnnnnnnnnnnnnnnnnnnnnnnnnnnnnnnnnnnnnnnnnnnnnnnnnnnnnnnnnnnnnnnnnnnnnnnnnnnnnnnnnnnnnnnnnnnnnnnnnnnnnnnnnnnnnnnnnnnnnnnnnnnnnnnnnnnnnnnnnnnnnnnnnnnnnnnnnnnnnnnnnnnnnnnnnnnnnnnnnnnnnnnnnnnnnnnnnnnnnnnnnnnnnnnnnnnnnnnnnnnnnnnnnnnnnnnnnnnnnnnnnnnnnnnnnnnnnnnnnnnnnnnnnnnnnnnnnnnnnnnnnnnnnnnnnnnnnnnnnnnnnnnnnnnnnnnnnnnnnnnnnnnnnnnnnnnnnnnnnnnnnnnnnnnnnnnnnnnnnnnnnnnnnnnnnnnnnnnnnnnnnnnnnnnnnnnnnnnnnnnnnnnnnnnnnnnnnnnnnnnnnnnnnnnnnnnnnnnnnnnnnnnnnnnnnnnnnnnnnnnnnnnnnnnnnnnnnnnnnnnnnnnnnnnnnnnnnnnnnnnnnnnnnnnnnnnnnnnnnnnnnnnnnnnnnnnnnnnnnnnnnnnnnnnnnnnnnnnnnnnnnnnnnnnnnnnnnnnnnnnnnnnnnnnnnnnnnnnnnnnnnnnnnnnnnnnnnnnnnnnnnnnnnnnnnnnnnnnnnnnnnnnnnnnnnnnnnnnnnnnnnnnnnnnnnnnnnnnnnnnnnnnnnnnnnnnnnnnnnnnnnnnnnnnnnnnnnnnnnnnnnnnnnnnnnnnnnnnnnnnnnnnnnnnnnnnnnnnnnnnnnnnnnnnnnnnnnnnnnnnnnnnnnnnnnnnnnnnnnnnnnnnnnnnnnnnnnnnnnnnnnnnnnnnnnnnnnnnnnnnnnnnnnnnnnnnnnnnnnnnnnnnnnnnnnnnnnnnnnnnnnnnnnnnnnnnnnnnnnnnnnnnnnnnnnnnnnnnnnnnnnnnnnnnnnnnnnnnnnnnnnnnnnnnnnnnnnnnnnnnnnnnnnnnnnnnnnnnnnnnnnnnnnnnnnnnnnnnnnnnnnnnnnnnnnnnnnnnnnnnnnnnnnnnnnnnnnnnnnnnnnnnnnnnnnnnnnnnnnnnnnnnnnnnnnnnnnnnnnnnnnnnnnnnnnnnnnnnnnnnnnnnnnnnnnnnnnnnnnnnnnnnnnnnnnnnnnnnnnnnnnnnnnnnnnnnnnnnnnnnnnnnnnnnnnnnnnnnnnnnnnnnnnnnnnnnnnnnnnnnnnnnnnnnnnnnnnnnnnnnnnnnnnnnnnnnnnnnnnnnnnnnnnnnnnnnnnnnnnnnnnnnnnnnnnnnnnnnnnnnnnnnnnnnnnnnnnnnnnnnnnnnnnnnnnnnnnnnnnnnnnnnnnnnnnnnnnnnnnnnnnnnnnnnnnnnnnnnnnnnnnnnnnnnnnnnnnnnnnnnnnnnnnnnnnnnnnnnnnnnnnnnnnnnnnnnnnnnnnnnnnnnnnnnnnnnnnnnnnnnnnnnnnnnnnnnnnnnnnnnnnnnnnnnnnnnnnnnnnnnnnnnnnnnnnnnnnnnnnnnnnnnnnnnnnnnnnnnnnnnnnnnnnnnnnnnnnnnnnnnnnnnnnnnnnnnnnnnnnnnnnnnnnnnnnnnnnnnnnnnnnnnnnnnnnnnnnnnnnnnnnnnnnnnnnnnnnnnnnnnnnnnnnnnnnnnnnnnnnnnnnnnnnnnnnnnnnnnnnnnnnnnnnnnnnnnnnnnnnnnnnnnnnnnnnnnnnnnnnnnnnnnnnnnnnnnnnnnnnnnnnnnnnnnnnnnnnnnnnnnnnnnnnnnnnnnnnnnnnnnnnnnnnnnnnnnnnnnnnnnnnnnnnnnnnnnnnnnnnnnnnnnnnnnnnnnnnnnnnnnnnnnnnnnnnnnnnnnnnnnnnnnnnnnnnnnnnnnnnnnnnnnnnnnnnnnnnnnnnnnnnnnnnnnnnnnnnnnnnnnnnnnnnnnnnnnnnnnnnnnnnnnnnnnnnnnnnnnnnnnnnnnnnnnnnnnnnnnnnnnnnnnnnnnnnnnnnnnnnnnnnnnnnnnnnnnnnnnnnnnnnnnnnnnnnnnnnnnnnnnnnnnnnnnnnnnnnnnnnnnnnnnnnnnnnnnnnnnnnnnnnnnnnnnnnnnnnnnnnnnnnnnnnnnnnnnnnnnnnnnnnnnnnnnnnnnnnnnnnnnnnnnnnnnnnnnnnnnnnnnnnnnnnnnnnnnnnnnnnnnnnnnnnnnnnnnnnnnnnnnnnnnnnnnnnnnnnnnnnnnnnnnnnnnnnnnnnnnnnnnnnnnnnnnnnnnnnnnnnnnnnnnnnnnnnnnnnnnnnnnnnnnnnnnnnnnnnnnnnnnnnnnnnnnnnnnnnnnnnnnnnnnnnnnnnnnnnnnnnnnnnnnnnnnnnnnnnnnnnnnnnnnnnnnnnnnnnnnnnnnnnnnnnnnnnnnnnnnnnnnnnnnnnnnnnnnnnnnnnnnnnnnnnnnnnnnnnnnnnnnnnnnnnnnnnnnnnnnnnnnnnnnnnnnnnnnnnnnnnnnnnnnnnnnnnnnnnnnnnnnnnnnnnnnnnnnnnnnnnnnnnnnnnnnnnnnnnnnnnnnnnnnnnnnnnnnnnnnnnnnnnnnnnnnnnnnnnnnnnnnnnnnnnnnnnnnnnnnnnnnnnnnnnnnnnnnnnnnnnnnnnnnnnnnnnnnnnnnnnnnnnnnnnnnnnnnnnnnnnnnnnnnnnnnnnnnnnnnnnnnnnnnnnnnnnnnnnnnnnnnnnnnnnnnnnnnnnnnnnnnnnnnnnnnnnnnnnnnnnnnnnnnnnnnnnnnnnnnnnnnnnnnnnnnnnnnnnnnnnnnnnnnnnnnnnnnnnnnnnnnnnnnnnnnnnnnnnnnnnnnnnnnnnnnnnnnnnnnnnnnnnnnnnnnnnnnnnnnnnnnnnnnnnnnnnnnnnnnnnnnnnnnnnnnnnnnnnnnnnnnnnnnnnnnnnnnnnnnnnnnnnnnnnnnnnnnnnnnnnnnnnnnnnnnnnnnnnnnnnnnnnnnnnnnnnnnnnnnnnnnnnnnnnnnnnnnnnnnnnnnnnnnnnnnnnnnnnnnnnnnnnnnnnnnnnnnnnnnnnnnnnnnnnnnnnnnnnnnnnnnnnnnnnnnnnnnnnnnnnnnnnnnnnnnnnnnnnnnnnnnnnnnnnnnnnnnnnnnnnnnnnnnnnnnnnnnnnnnnnnnnnnnnnnnnnnnnnnnnnnnnnnnnnnnnnnnnnnnnnnnnnnnnnnnnnnnnnnnnnnnnnnnnnnnnnnnnnnnnnnnnnnnnnnnnnnnnnnnnnnnnnnnnnnnnnnnnnnnnnnnnnnnnnnnnnnnnnnnnnnnnnnnnnnnnnnnnnnnnnnnnnnnnnnnnnnnnnnnnnnnnnnnnnnnnnnnnnnnnnnnnnnnnnnnnnnnnnnnnnnnnnnnnnnnnnnnnnnnnnnnnnnnnnnnnnnnnnnnnnnnnnnnnnnnnnnnnnnnnnnnnnnnnnnnnnnnnnnnnnnnnnnnnnnnnnnnnnnnnnnnnnnnnnnnnnnnnnnnnnnnnnnnnnnnnnnnnnnnnnnnnnnnnnnnnnnnnnnnnnnnnnnnnnnnnnnnnnnnnnnnnnnnnnnnnnnnnnnnnnnnnnnnnnnnnnnnnnnnnnnnnnnnnnnnnnnnnnnnnnnnnnnnnnnnnnnnnnnnnnnnnnnnnnnnnnnnnnnnnnnnnnnnnnnnnnnnnnnnnnnnnnnnnnnnnnnnnnnnnnnnnnnnnnnnnnnnnnnnnnnnnnnnnnnnnnnnnnnnnnnnnnnnnnnnnnnnnnnnnnnnnnnnnnnnnnnnnnnnnnnnnnnnnnnnnnnnnnnnnnnnnnnnnnnnnnnnnnnnnnnnnnnnnnnnnnnnnnnnnnnnnnnnnnnnnnnnnnnnnnnnnnnnnnnnnnnnnnnnnnnnnnnnnnnnnnnnnnnnnnnnnnnnnnnnnnnnnnnnnnnnnnnnnnnnnnnnnnnnnnnnnnnnnnnnnnnnnnnnnnnnnnnnnnnnnnnnnnnnnnnnnnnnnnnnnnnnnnnnnnnnnnnnnnnnnnnnnnnnnnnnnnnnnnnnnnnnnnnnnnnnnnnnnnnnnnnnnnnnnnnnnnnnnnnnnnnnnnnnnnnnnnnnnnnnnnnnnnnnnnnnnnnnnnnnnnnnnnnnnnnnnnnnnnnnnnnnnnnnnnnnnnnnnnnnnnnnnnnnnnnnnnnnnnnnnnnnnnnnnnnnnnnnnnnnnnnnnnnnnnnnnnnnnnnnnnnnnnnnnnnnnnnnnnnnnnnnnnnnnnnnnnnnnnnnnnnnnnnnnnnnnnnnnnnnnnnnnnnnnnnnnnnnnnnnnnnnnnnnnnnnnnnnnnnnnnnnnnnnnnnnnnnnnnnnnnnnnnnnnnnnnnnnnnnnnnnnnnnnnnnnnnnnnnnnnnnnnnnnnnnnnnnnnnnnnnnnnnnnnnnnnnnnnnnnnnnnnnnnnnnnnnnnnnnnnnnnnnnnnnnnnnnnnnnnnnnnnnnnnnnnnnnnnnnnnnnnnnnnnnnnnnnnnnnnnnnnnnnnnnnnnnnnnnnnnnnnnnnnnnnnnnnnnnnnnnnnnnnnnnnnnnnnnnnnnnnnnnnnnnnnnnnnnnnnnnnnnnnnnnnnnnnnnnnnnnnnnnnnnnnnnnnnnnnnnnnnnnnnnnnnnnnnnnnnnnnnnnnnnnnnnnnnnnnnnnnnnnnnnnnnnnnnnnnnnnnnnnnnnnnnnnnnnnnnnnnnnnnnnnnnnnnnnnnnnnnnnnnnnnnnnnnnnnnnnnnnnnnnnnnnnnnnnnnnnnnnnnnnnnnnnnnnnnnnnnnnnnnnnnnnnnnnnnnnnnnnnnnnnnnnnnnnnnnnnnnnnnnnnnnnnnnnnnnnnnnnnnnnnnnnnnnnnnnnnnnnnnnnnnnnnnnnnnnnnnnnnnnnnnnnnnnnnnnnnnnnnnnnnnnnnnnnnnnnnnnnnnnnnnnnnnnnnnnnnnnnnnnnnnnnnnnnnnnnnnnnnnnnnnnnnnnnnnnnnnnnnnnnnnnnnnnnnnnnnnnnnnnnnnnnnnnnnnnnnnnnnnnnnnnnnnnnnnnnnnnnnnnnnnnnnnnnnnnnnnnnnnnnnnnnnnnnnnnnnnnnnnnnnnnnnnnnnnnnnnnnnnnnnnnnnnnnnnnnnnnnnnnnnnnnnnnnnnnnnnnnnnnnnnnnnnnnnnnnnnnnnnnnnnnnnnnnnnnnnnnnnnnnnnnnnnnnnnnnnnnnnnnnnnnnnnnnnnnnnnnnnnnnnnnnnnnnnnnnnnnnnnnnnnnnnnnnnnnnnnnnnnnnnnnnnnnnnnnnnnnnnnnnnnnnnnnnnnnnnnnnnnnnnnnnnnnnnnnnnnnnnnnnnnnnnnnnnnnnnnnnnnnnnnnnaaccccatcttctcatccgtcaaaaaactccaaccgaggccgtacaccaaatgcatggttccggtctcgggctcttctgcctttaatgcgtcatttccaggtatgtgtactaactctggttctctctttatattttggtaggtataatggacaattccgtggaggttgtggatgaatctctgtctgccgagtccgagtcgggcgcggttcctgcgttggcctccatatttcattgggttacctacgaaattcttagaaccttctccaccctcgaactatccactatagcctcactccccttaggtaaacaagacgggtttggggtccgggctccctactcgggtgaacccatttgtgcccatagagagggcaatgatcccaacttctttttcttctacgagggggtagtttctcaaataggggtgaccttccccttcacctcttttgagatggacgtgttaaaccatctccgaatagccccttctcagcttcatccgaacagctggggatttgtgaggaccttcgaattattctgtgaagagcttcggatcccctgtacagttccactctttttttattattattacccgaacactcctaggacggggaaagaaccgcccgagcgtaagggatgggtcgccctgcggagtcagaataagcggaaattaattgttccgtttacagagtccttccggggatttaaagataaatattttaaagtcgcagccaatcccgggcagcgaccattttttctgcggggggatgagtctgctgacgtagagtggtcgtttcccttgtattggtcgcaagaccattatcaggataaggctaattataagttcatcgaagagtcattgtccgatgctgaagcctctgccatctctgtgatttcggagtatctcgacaccaaggggccgccccatgcggccgtttatgtccgccgtgctcgcggcagttcctccgcttaccgtaattatagctctcgacgagttttgttcggtatgtatcttgaatgttatatctgatgtgtccttgtttatttcagtgaacatgggacaaccagctggttcagccgccgccgacccgaagccaaccgagcttgcaaataaagctccacaaaaagggcaaaagcggggtcctccctctttccgggcaatgttggagggagaaaataaaagagctaaggttcagaaaaaatctgttgctcttagaccgtctactccaacggctgctcctcgggggaccccgtctgcagtcgtccccgtctctgctgcccgggaacgtgcttccccgtcgactgccgccttgcagaatgagcgagctgggtccttagccgcgacggggaatgtttgggagaagggggtaaccgaggagctggtcaagcttaccaagcctcccagttatctcctcgaaccgggtgcccccgtgggagacgagctcgcggcattggttcgcgttgaagagaacgcttatcaatgcgcttctctagtacgggcctttgccactgttcggcacaagtaagtattcaccgatacttcatctgtattcttcatttttcaggttctaattgatttaatgtagatatggggtggcggtagaagagaaaaagaaatccgaccaagctctcatggccgcccgggctgctcatggagaggacaaggaaaggtcttccgctgaaattaggaagttgaaggaggacctactctccgtgcaagccatagcggcgtcgctgcgagcagatctggggcgtgcccaaggtgacctcgaggcttctgatcagaagatagcgatgttatcctccaccatcgactctttgaaagccgagcacgaggaaaagctttcagaggtgaaggccgcccttgctgttgccgtcgaggactctttccataacaccttagatcaagttaagtttttgaatcctgatgttaacctttgcacaaccgggatgcattacttagcttatgtagacgagggccgtttggttcccccatctggtgctgaagattcctcgatggtagccgccgaggaggcggtacacgtagatgaagcttctnnnnnnnnnnnnnnnnnnnnnnnnnnnnnnnnnnnnnnnnnnnnnnnnnnnnnnnnnnnnnnnnnnnnnnnnnnnnnnnnnnnnnnnnnnnnnnnnnnnnnnnnnnnnnnnnnnnnnnnnnnnnnnnnnnnnnnnnnnnnnnnnnnnnnnnnnnnnnnnnnnnnnnnnnnnnnnnnnnnnnnnnnnnnnnnnnnnnnnnnnnnnnnnnnnnnnnnnnnnnnnnnnnnnnnnnnnnnnnnnnnnnnnnnnnnnnnnnnnnnnnnnnnnnnnnnnnnnnnnnnnnnnnnnnnnnnnnnnnnnnnnnnnnnnnnnnnnnnnnnnnnnnnnnnnnnnnnnnnnnnnnnnnnnnnnnnnnnnnnnnnnnnnnnnnnnnnnnnnnnnnnnnnnnnnnnnnnnnnnnnnnnnnnnnnnnnnnnnnnnnnnnnnnnnnnnnnnnnnnnnnnnnnnnnnnnnnnnnnnnnnnnnnnnnnnnnnnnnnnnnnnnnnnnnnnnnnnnnnnnnnnnnnnnnnnnnnnnnnnnnnnnnnnnnnnnnnnnnnnnnnnnnnnnnnnnnnnnnnnnnnnnnnnnnnnnnnnnnnnnnnnnnnnnnnnnnnnnnnnnnnnnnnnnnnnnnnnnnnnnnnnnnnnnnnnnnnnnnnnnnnnnnnnnnnnnnnnnnnnnnnnnnnnnnnnnnnnnnnnnnnnnnnnnnnnnnnnnnnnnnnnnnnnnnnnnnngtctagctttttagtgacccggtatgggccctcccagttagccgcgaattttccgtctcgggcattcttgtttccgatgtcggcacgtcgtagtaccagatcggtttcttcaaattcccgcgggaccacccttttattgtaggcgcgtgccatctgttgtttcagtttcagttctctgtcgtgcgctgctgcccggatctcctcaacgactgtcgactccagggctaatacttcattatttgtttcctccccggcttgcaatgtctgtctccgtcgccatgattgctgtccgacctcgacggggatcattgcttcgtttccgtatgtcatgcggaatggtgtctccccggttgatgattggaccgaagtccggatcccccataggacataatataattgttccacccaagtcgatccggcctcgtgcattcgtttccgtagggcctccagaattgttttgtttgcggcttcagcctggccgttggattgggggtgctcgacagatgcgaaccggtgtcggatttggaaattagccatcatctcctgaaatcctctgtcaatgaattgggttccgttgtcgataattatttccccagggattccgaaacgggaaattatatttctttcgaaaaatttctgtactcgggccgacgtgattgtcgttgagggggctgcttcaatccacttggtataataatctacagccactatcagccacctcatctgtccttccgccggcttgaatggtcccaacagatccatgccccatttgtaaaatggccatggcgccgaaatggactgcaattcctccggcggggataaaatcctggtcgcgtgcatctggcagctttcacaagatctcacgtgatttgtggcgtccgcactcattgtcggccaaaaataaccagcccgtaacgcctttctcgtcagtgcccggccccccatatgctgtccgttgattccttcgtggatctcggataggatatagtcgactcggtttggggccacgcataccaataaagggctatgtaacccccttcggtataattctccgtcgaccatagtgtacatggccgacgttcttgtcagacgtcgggcttctatatcgtcgtctggcaagattcctctttccagaaaatttactatgggtcgacgccagtcctggtcggaggtaatcatcattacgcacgtcggttgcatcgtttgctgttgaattactgtgcggttgttcccgggctttttggtgctcgccaatttggacaggatatccgcccgagtattatcttctcgggggatgtgactcacagaaatgtcgtcgaactcggacatcaattcttttactcggctcaggtatttggccaacaaaggcccctttacctgataccgtccttcaatttgtgatgcgaccagctgggagtccgtgtagactttgacgttacgtgcctcctgctctttggcctgcacgagtccggcgatcaacgcctcgtactcggcctgattgttcgaagtcgggaaacctagttgtagggatatttccgtagccactccatctgggttctcgacnnnnnnnnnnnnnnnnnnnnnnnnnnnnnnnnnnnnnnnnnnnnnnnnnnnnnnnnnnnnnnnnnnnnnnnnnnnnnnnnnnnnnnnnnnnnnnnnnnnnnnnnnnnnnnnnnnnnnnnnnnnnnnnnnnnnnnnnnnnnnnnnnnnnnnnnnnnnnnnnnnnnnnnnnnnnnnnnnnnnnnnnnnnnnnnnnnnnnnnnnnnnnnnnnnnnnnnnnnnnnnnnnnnnnnnnnnnnnnnnnnnnnnnnnnnnnnnnnnnnnnnnnnnnnnnnnnnnnnnnnnnnnnnnnnnnnnnnnnnnnnnnnnnnnnnnnnnnnnnnnnnnnnnnnnnnnnnnnnnnnnnnnnnnnnnnnnnnnnnnnnnnnnnnnnnnnnnnnnnnnnnnnnnnnnnnnnnnnnnnnnnnnnnnnnnnnnnnnnnnnnnnnnnnnnnnnnnnnnnnnnnnnnnnnnnnnnnnnnnnnnnnnnnnnnnnnnnnnnnnnnnnnnnnnnnnnnnnnnnnnnnnnnnnnnnnnnnnnnnnnnnnnnnnnnnnnnnnnnnnnnnnnnnnnnnnnnnnnnnnnnnnnnnnnnnnnnnnnnnnnnnnnnnnnnnnnnnnnnnnnnnnnnnnnnnnnnnnnnnnnnnnnnnnnnnnnnnnnnnnnnnnnnnnnnnnnnnnnnnnnnnnnnnnnnnnnnnnnnnnnnnnnnnnnnnnnnnnnnnnnnnnnnnnnnnnnnnnnnnnnnnnnnnnnnnnnnnnnnnnnnnnnnnnnnnnnnnnnnnnnnnnnnnnnnnnnnnnnnnnnnnnnnnnnnnnnnnnnnnnnnnnnnnnnnnnnnnnnnnnnnnnnnnnnnnnnnnnnnnnnnnnnnnnnnnnnnnnnnnnnnnnnnnnnnnnnnnnnnnnnnnnnnnnnnnnnnnnnnnnnnnnnnnnnnnnnnnnnnnnnnnnnnnnnnnnnnnnnnnnnnnnnnnnnnnnnnnnnnnnnnnnnnnnnnnnnnnnnnnnnnnnnnnnnnnnnnnnnnnnnnnnnnnnnnnnnnnnnnnnnnnnnnnnnnnnnnnnnnnnnnnnnnnnnnnnnnnnnnnnnnnnnnnnnnnnnnnnnnnnnnnnnnnnnnnnnnnnnnnnnnnnnnnnnnnnnnnnnnnnnnnnnnnnnnnnnnnnnnnnnnnnnnnnnnnnnnnnnnnnnnnnnnnnnnnnnnnnnnnnnnnnnnnnnnnnnnnnnnnnnnnnnnnnnnnnnnnnnnnnnnnnnnnnnnnnnnnnnnnnnnnnnnnnnnnnnnnnnnnnnnnnnnnnnnnnnnnnnnnnnnnnnnnnnnnnnnnnnnnnnnnnnnnnnnnnnnnnnnnnnnnnnnnnnnnnnnnnnnnnnnnnnnnnnnnnnnnnnnnnnnnnnnnnnnnnnnnnnnnnnnnnnnnnnnnnnnnnnnnnnnnnnnnnnnnnnnnnnnnnnnnnnnnnnnnnnnnnnnnnnnnnnnnnnnnnnnnnnnnnnnnnnnnnnnnnnnnnnnnnnnnnnnnnnnnnnnnnnnnnnnnnnnnnnnnnnnnnnnnnnnnnnnnnnnnnnnnnnnnnnnnnnnnnnnnnnnnnnnnnnnnnnnnnnnnnnnnnnnnnnnnnnnnnnnnnnnnnnnnnnnnnnnnnnnnnnnnnnnnnnnnnnnnnnnnnnnnnnnnnnnnnnnnnnnnnnnnnnnnnnnnnnnnnnnnnnnnnnnnnnnnnnnnnnnnnnnnnnnnnnnnnnnnnnnnnnnnnnnnnnnnnnnnnnnnnnnnnnnnnnnnnnnnnnnnnnnnnnnnnnnnnnnnnnnnnnnnnnnnnnnnnnnnnnnnnnnnnnnnnnnnnnnnnnnnnnnnnnnnnnnnnnnnnnnnnnnnnnnnnnnnnnnnnnnnnnnnnnnnnnnnnnnnnnnnnnnnnnnnnnnnnnnnnnnnnnnnnnnnnnnnnnnnnnnnnnnnnnnnnnnnnnnnnnnnnnnnnnnnnnnnnnnnnnnnnnnnnnnnnnnnnnnnnnnnnnnnnnnnnnnnnnnnnnnnnnnnnnnnnnnnnnnnnnnnnnnnnnnnnnnnnnnnnnnnnnnnnnnnnnnnnnnnnnnnnnnnnnnnnnnnnnnnnnnnnnnnnnnnnnnnnnnnnnnnnnnnnnnnnnnnnnnnnnnnnnnnnnnnnnnnnnnnnnnnnnnnnnnnnnnnnnnnnnnnnnnnnnnnnnnnnnnnnnnnnnnnnnnnnnnnnnnnnnnnnnnnnnnnnnnnnnnnnnnnnnnnnnnnnnnnnnnnnnnnnnnnnnnnnnnnnnnnnnnnnnnnnnnnnnnnnnnnnnnnnnnnnnnnnnnnnnnnnnnnnnnnnnnnnnnnnnnnnnnnnnnnnnnnnnnnnnnnnnnnnnnnnnnnnnnnnnnnnnnnnnnnnnnnnnnnnnnnnnnnnnnnnnnnnnnnnnnnnnnnnnnnnnnnnnnnnnnnnnnnnnnnnnnnnnnnnnnnnnnnnnnnnnnnnnnnnnnnnnnnnnnnnnnnnnnnnnnnnnnnnnnnnnnnnnnnnnnnnnnnnnnnnnnnnnnnnnnnnnnnnnnnnnnnnnnnnnnnnnnnnnnnnnnnnnnnnnnnnnnnnnnnnnnnnnnnnnnnnnnnnnnnnnnnnnnnnnnnnnnnnnnnnnnnnnnnnnnnnnnnnnnnnnnnnnnnnnnnnnnnnnnnnnnnnnnnnnnnnnnnnnnnnnnnnnnnnnnnnnnnnnnnnnnnnnnnnnnnnnnnnnnnnnnnnnnnnnnnnnnnnnnnnnnnnnnnnnnnnnnnnnnnnnnnnnnnnnnnnnnnnnnnnnnnnnnnnnnnnnnnnnnnnnnnnnnnnnnnnnnnnnnnnnnnnnnnnnnnnnnnnnnnnnnnnnnnnnnnnnnnnnnnnnnnnnnnnnnnnnnnnnnnnnnnnnnnnnnnnnnnnnnnnnnnnnnnnnnnnnnnnnnnnnnnnnnnnnnnnnnnnnnnnnnnnnnnnnnnnnnnnnnnnnnnnnnnnnnnnnnnnnnnnnnnnnnnnnnnnnnnnnnnnnnnnnnnnnnnnnnnnnnnnnnnnnnnnnnnnnnnnnnnnnnnnnnnnnnnnnnnnnnnnnnnnnnnnnnnnnnnnnnnnnnnnnnnnnnnnnnnnnnnnnnnnnnnnnnnnnnnnnnnnnnnnnnnnnnnnnnnnnnnnnnnnnnnnnnnnnnnnnnnnnnnnnnnnnnnnnnnnnnnnnnnnnnnnnnnnnnnnnnnnnnnnnnnnnnnnnnnnnnnnnnnnnnnnnnnnnnnnnnnnnnnnnnnnnnnnnnnnnnnnnnnnnnnnnnnnnnnnnnnnnnnnnnnnnnnnnnnnnnnnnnnnnnnnnnnnnnnnnnnnnnnnnnnnnnnnnnnnnnnnnnnnnnnnnnnnnnnnnnnnnnnnnnnnnnnnnnnnnnnnnnnnnnnnnnnnnnnnnnnnnnnnnnnnnnnnnnnnnnnnnnnnnnnnnnnnnnnnnnnnnnnnnnnnnnnnnnnnnnnnnnnnnnnnnnnnnnnnnnnnnnnnnnnnnnnnnnnnnnnnnnnnnnnnnnnnnnnnnnnnnnnnnnnnnnnnnnnnnnnnnnnnnnnnnnnnnnnnnnnnnnnnnnnnnnnnnnnnnnnnnnnnnnnnnnnnnnnnnnnnnnnnnnnnnnnnnnnnnnnnnnnnnnnnnnnnnnnnnnnnnnnnnnnnnnnnnnnnnnnnnnnnnnnnnnnnnnnnnnnnnnnnnnnnnnnnnnnnnnnnnnnnnnnnnnnnnnnnnnnnnnnnnnnnnnnnnnnnnnnnnnnnnnnnnnnnnnnnnnnnnnnnnnnnnnnnnnnnnnnnnnnnnnnnnnnnnnnnnnnnnnnnnnnnnnnnnnnnnnnnnnnnnnnnnnnnnnnnnnnnnnnnnnnnnnnnnnnnnnnnnnnnnnnnnnnnnnnnnnnnnnnnnnnnnnnnnnnnnnnnnnnnnnnnnnnnnnnnnnnnnnnnnnnnnnnnnnnnnnnnnnnnnnnnnnnnnnnnnnnnnnnnnnnnnnnnnnnnnnnnnnnnnnnnnnnnnnnnnnnnnnnnnnnnnnnnnnnnnnnnnnnnnnnnnnnnnnnnnnnnnnnnnnnnnnnnnnnnnnnnnnnnnnnnnnnnnnnnnnnnnnnnnnnnnnnnnnnnnnnnnnnnnnnnnnnnnnnnnnnnnnnnnnnnnnnnnnnnnnnnnnnnnnnnnnnnnnnnnnnnnnnnnnnnnnnnnnnnnnnnnnnnnnnnnnnnnnnnnnnnnnnnnnnnnnnnnnnnnnnnnnnnnnnnnnnnnnnnnnnnnnnnnnnnnnnnnnnnnnnnnnnnnnnnnnnnnnnnnnnnnnnnnnnnnnnnnnnnnnnnnnnnnnnnnnnnnnnnnnnnnnnnnnnnnnnnnnnnnnnnnnnnnnnnnnnnnnnnnnnnnnnnnnnnnnnnnnnnnnnnnnnnnnnnnnnnnnnnnnnnnnnnnnnnnnnnnnnnnnnnnnnnnnnnnnnnnnnnnnnnnnnnnnnnnnnnnnnnnnnnnnnnnnnnnnnnnnnnnnnnnnnnnnnnnnnnnnnnnnnnnnnnnnnnnnnnnnnnnnnnnnnnnnnnnnnnnnnnnnnnnnnnnnnnnnnnnnnnnnnnnnnnnnnnnnnnnnnnnnnnnnnnnnnnnnnnnnnnnnnnnnnnnnnnnnnnnnnnnnnnnnnnnnnnnnnnnnnnnnnnnnnnnnnnnnnnnnnnnnnnnnnnnnnnnnnnnnnnnnnnnnnnnnnnnnnnnnnnnnnnnnnnnnnnnnnnnnnnnnnnnnnnnnnnnnnnnnnnnnnnnnnnnnnnnnnnnnnnnnnnnnnnnnnnnnnnnnnnnnnnnnnnnnnnnnnnnnnnnnnnnnnnnnnnnnnnnnnnnnnnnnnnnnnnnnnnnnnnnnnnnnnnnnnnnnnnnnnnnnnnnnnnnnnnnnnnnnnnnnnnnnnnnnnnnnnnnnnnnnnnnnnnnnnnnnnnnnnnnnnnnnnnnnnnnnnnnnnnnnnnnnnnnnnnnnnnnnnnnnnnnnnnnnnnnnnnnnnnnnnnnnnnnnnnnnnnnnnnnnnnnnnnnnnnnnnnnnnnnnnnnnnnnnnnnnnnnnnnnnnnnnnnnnnnnnnnnnnnnnnnnnnnnnnnnnnnnnnnnnnnnnnnnnnnnnnnnnnnnnnnnnnnnnnnnnnnnnnnnnnnnnnnnnnnnnnnnnnnnnnnnnnnnnnnnnnnnnnnnnnnnnnnnnnnnnnnnnnnnnnnnnnnnnnnnnnnnnnnnnnnnnnnnnnnnnnnnnnnnnnnnnnnnnnnnnnnnnnnnnnnnnnnnnnnnnnnnnnnnnnnnnnnnnnnnnnnnnnnnnnnnnnnnnnnnnnnnnnnnnnnnnnnnnnnnnnnnnnnnnnnnnnnnnnnnnnnnnnnnnnnnnnnnnnnnnnnnnnnnnnnnnnnnnnnnnnnnnnnnnnnnnnnnnnnnnnnnnnnnnnnnnnnnnnnnnnnnnnnnnnnnnnnnnnnnnnnnnnnnnnnnnnnnnnnnnnnnnnnnnnnnnnnnnnnnnnnnnnnnnnnnnnnnnnnnnnnnnnnnnnnnnnnnnnnnnnnnnnnnnnnnnnnnnnnnnnnnnnnnnnnnnnnnnnnnnnnnnnnnnnnnnnnnnnnnnnnnnnnnnnnnnnnnnnnnnnnnnnnnnnnnnnnnnnnnnnnnnnnnnnnnnnnnnnnnnnnnnnnnnnnnnnnnnnnnnnnnnnnnnnnnnnnnnnnnnnnnnnnnnnnnnnnnnnnnnnnnnnnnnnnnnnnnnnnnnnnnnnnnnnnnnnnnnnnnnnnnnnnnnnnnnnnnnnnnnnnnnnnnnnnnnnnnnnnnnnnnnnnnnnnnnnnnnnnnnnnnnnnnnnnnnnnnnnnnnnnnnnnnnnnnnnnnnnnnnnnnnnnnnnnnnnnnnnnnnnnnnnnnnnnnnnnnnnnnnnnnnnnnnnnnnnnnnnnnnnnnnnnnnnnnnnnnnnnnnnnnnnnnnnnnnnnnnnnnnnnnnnnnnnnnnnnnnnnnnnnnnnnnnnnnnnnnnnnnnnnnnnnnnnnnnnnnnnnnnnnnnnnnnnnnnnnnnnnnnnnnnnnnnnnnnnnnnnnnnnnnnnnnnnnnnnnnnnnnnnnnnnnnnnnnnnnnnnnnnnnnnnnnnnnnnnnnnnnnnnnnnnnnnnnnnnnnnnnnnnnnnnnnnnnnnnnnnnnnnnnnnnnnnnnnnnnnnnnnnnnnnnnnnnnnnnnnnnnnnnnnnnnnnnnnnnnnnnnnnnnnnnnnnnnnnnnnnnnnnnnnnnnnnnnnnnnnnnnnnnnnnnnnnnnnnnnnnnnnnnnnnnnnnnnnnnnnnnnnnnnnnnnnnnnnnnnnnnnnnnnnnnnnnnnnnnnnnnnnnnnnnnnnnnnnnnnnnnnnnnnnnnnnnnnnnnnnnnnnnnnnnnnnnnnnnnnnnnnnnnnnnnnnnnnnnnnnnnnnnnnnnnnnnnnnnnnnnnnnnnnnnnnnnnnnnnnnnnnnnnnnnnnnnnnnnnnnnnnnnnnnnnnnnnnnnnnnnnnnnnnnnnnnnnnnnnnnnnnnnnnnnnnnnnnnnnnnnnnnnnnnnnnnnnnnnnnnnnnnnnnnnnnnnnnnnnnnnnnnnnnnnnnnnnnnnnnnnnnnnnnnnnnnnnnnnnnnnnnnnnnnnnnnnnnnnnnnnnnnnnnnnnnnnnnnnnnnnnnnnnnnnnnnnnnnnnnnnnnnnnnnnnnnnnnnnnnnnnnnnnnnnnnnnnnnnnnnnnnnnnnnnnnnnnnnnnnnnnnnnnnnnnnnnnnnnnnnnnnnnnnnnnnnnnnnnnnnnnnnnnnnnnnnnnnnnnnnnnnnnnnnnnnnnnnnnnnnnnnnnnnnnnnnnnnnnnnnnnnnnnnnnnnnnnnnnnnnnnnnnnnnnnnnnnnnnnnnnnnnnnnnnnnnnnnnnnnnnnnnnnnnnnnnnnnnnnnnnnnnnnnnnnnnnnnnnnnnnnnnnnnnnnnnnnnnnnnnnnnnnnnnnnnnnnnnnnnnnnnnnnnnnnnnnnnnnnnnnnnnnnnnnnnnnnnnnnnnnnnnnnnnnnnnnnnnnnnnnnnnnnnnnnnnnnnnnnnnnnnnnnnnnnnnnnnnnnnnnnnnnnnnnnnnnnnnnnnnnnnnnnnnnnnnnnnnnnnnnnnnnnnnnnnnnnnnnnnnnnaaatattaaaagttgttacaaaataataaaaaaattatttatcaaacaatcaaatatattttttagttaaaaaaaactaaaaatttacttaaatgtcttgacaaacataaccataatctatttgttgaattttatttttgttatttaaacatatgtttttgctttcattatagggcttagattacttaaatgttttatttataaattttaggtttaaatcacttttggtccatatcattttgtgattatgcaattttaatctcttgaaaatttttattgcatatttggtccctcatgtttgtaaacatgttaatgttaacatgacattgacatactatcaagacaatgatgtgaaaaaatcaacatatatgttaatgtgccactaataatgtgttgtatatagataaaaaaaaaaaaatactaacatgcaacatcagcacattactaatatcaattcaacataaatgttagaatgtcttgtcaacattggcggactcacatatatttttgtgttcgcacttgcggacacgaacattttatatatttttttattaataatatttgagttaaaaatatcttacctttattcttagttgcagctatgctcctctctcaacttcacgtcttgaccttatcggctcacctccttcagccaccgtcacgcaacaccgtcaagcgctagcacctcacgcaaccgcgaccatggcctcgtcgtcaacagcccgacaccgttctgacgctgacagcccgacaccgtcgtcaagcacctcaagcaaccgcgaccttggcctcgtcgtccaccgcatcggcaaccgccaaccgcgacctatcagcagcagaggttggcactctcgttgcatttttcaatttgttctcagtaattttatcaatctgttctcagcagaggcgcttcatttttcaatcaatccatgcgtttgtgattttggttgccactctcgacttattaccataatcatttagtttgagtaacttggattttggttcagcaccatgtgtttgtgaatatgcctgaaagagaaagaaaacttgaaaactatggtttctactcttctcaagtaacttccagtaattccatgaattaaaatccatgtaagtaattacttgttaccaatttgtgttgtttattgcatacggtttataaccttgtatataaagtgttgacttaaattttcttaaaaaaataattttgggatgctgatccgtacctcgctactaagtgtgcgaacataaacaaaaatttctgggtctgtcactgcttgtcaacatataaatatcatatcgtcactaacattttaagatatcaatttttgttaaaaattgacaacatactaacaatgtacaaaaattgctaaaacttgagaaaacatggaagactaaatgtgcaataatatattttgagtgatcaaaattgcataataattaaaactacaggaatcaaaagtgaatttaagtcaaaattttatttgcatatttaatattatttatatttttttattttattattagaattaattgtattttttgttcccaatttttatttttttaacgaattttacctttaagaaattaatttgataattttacttttaactttttgaaatacaggcaattatagttctcatcataaaactggtacgacacgctaaaataattatactttttatcctctctcaatttttttactttttgacaaattttatccataatcttttccactttttatgaattttaccctcaattttttaacctttagacaaattttattcccaacttcgatgttgtcacgctcaaatacgaaagataaaagttacaagtttttaaaaaagtcaaaagtaaaatacatcaaattaatatgtgaaagataaaatttgttaaaaaataaaaaataaaaaatacaattaaacaatattattattttcatcaatattgttactatttttttacatgattgttactattatttctattataaaatgttgttactatcctttctggaaatgtcgaaacaagcacttgctaaagctaaacaacagactttgtttgcaaaataacatagccattgaagctaacacgagggaacaatgctggaagcaacctaagatgacgttggctcgggcttgacaataatatttcgagacaatgaaggccaaccacttctctatgatacaaaattctagtctttgtatatattggacgggtttaaagataaaataattgaagtctaaattttagatacatcaaaaaataattatttgatattagtttttataaaacaaatacctcatatattaacaaaaagactgcacatattaataaaaagatctattatataattatcttatttaaagtataatatttttattaaaatttgcttttaatttcactcacgatttcagatacggacccaagggggcaggcagggcccaaactgaacttcatgcgaagtcccaacaaaggaaaatgtatatgggaatttcgataatcattgttaactagtaagaataataagatttattatattattagtaggtcaggaaacacatacagcatataattaatttattatatttttaatttctagataagggtcaaggattgggctggcggataatttcttagcatttttttctctggtggtaagggataaaatggaggatacaatatttgttaaagaaattaatttatggtttttgttggtaacaaagtctataatgttctgattgacaagtttgagctcttgtgttctaaacttagctttgaatgaaattgttttctaaaaaaactaatcaacatcaataacattttttttggaaaatatgtaaaaatatatatatttccaaagatacttacaaaatacttagggcataccctggctaatcacaaaaagaatagactacacttgccaaaagaagcaaatgcggaaatgcctagaaaactaccgggcaacaaaacaacacatttgctaatacaagtgcgtcaaatgagcatatttaagcactctaaacttaattctatctattacatcagataaaacaaatctatgctggtcaaacaagatactatttctacaactccaaatacaaaagaccgtagtagccaaagcaagacaacgaaattttccccgcacacccgtggctgccctatagtgcaccagactgctgagagtgccctgcagcgagatgttctttttagggaaatcagcccaatctctaatgcaagcccacaccttaagaacaattctgcactgaaaaaagaggtgatcgtttgtctctaccgcgtgatgtcaaaaacagcaatcagaccctttattgagaaagggtgcacggtctaacgttaggagctttctgctagctgccaaccacaaagtaaaagattccttcggagggttgggggaattacaaacgactttcgcccagaatattttaggattagactccctgaagtagttataggcgataccagcatcaaacttaccatacagattccaagattccagcttgctaccagcctgaacaacatttccttctctcgaaatcaacttgtctctaatgcagaacagccgcttgaccaaggctgaatccgaattggaacatgtgtataaacaagccgagtgcccctttaaataataatgctgaatccatctaatccacagagtttctttgctggcagcaatgtcccaaaaaattctggatagcagcgcgctattccaatccttcagagcatgcaggccaaggcctccttcattcttgggagaacaaacagttttctaggctatcagcggcttctttctcccaagctctccttttccccagaagaagttcctacaaaaagagtctatcctgtcaatgactgtcaccgggagcggaaacaggcccatccagaagttcaccatgccgccaatgacacctctaatcaactcaacccaacctgcataggacaaggatttcctatgccaattctgaatgtgaccaccaattctgttgagaagcggggagtaatggcagatgttcaacctagacgccaataagggaattcccagataacgaacagggaatgtgcctctctgaaagctcgtcatactatgcagatcaaccaaggtggagtcatcaattccaacagcaatgagagtagatttattatgactaatagatagccccgagactttgcaaaaactggagagctttttatatatggaagcgactgaagagtaattccctctagagaacagcaccaaatcattcgcgaatgccaggtgagtgatgttgagggaagcgcagctaggatggaagttgaacaacatgctgtttttcagctggttaagatctctggagagaaattccaggcaaataacaaagagatagggagatagcggatcctcttgcctcagccctctattgccagcaaagtgcccaaagatgcgaccattcacagaaatgctaaaggaggttgtagagatgcactccatgatccagccggaaaaaactgcggggaaaccaagcacctctagcatccatcttaggaaatcccacgatatagagtcataggctttgtgcagatccacgttcaacatacatctgggagaggttctctttctggagtattttctgataatctcctggaccaagaaaatgttgtcagccatgcttctagcttttacaaacgctacttgggccggatcgatgatggattccagagctggcatcaatctgtttgccaacacctttgagatgagcttgtacataacattgcaacaggatataggtctaaattgagtaactctggtagcattttctgtcttaggattaacgcaatgaaagcatggttaatctgccgaagcatctttcccgactgaaaaaattcctgcactgcagccacaacatcaacaccaataatgggccaggctttcttgaaaaagagagcattgtagccatcaggccctggagacttattgttgtccatctgtgaaacaatgttccagacctcttcataagacactggcttgagaagctgagggaacagctcagggggtagcttaggaccatgagcatagacatccaaagagggggggtcacaactcggcctggttcctagaagggcagaaaagaagttgacaaattctgctccaacctcttcttgggacttagtgctactcccatcatcccgaataatggctgggatgaacttagcgtttctctccttgttaataagagagtagtagaatttagtacttctatcagcctccacaaggtacttattcttcgttaactgggctattttccaagattcagccaacctgagggcatgaatactagctttggtagaggcaatcttgatcataagagcttgatctagagggtatgcctgagcctggagcagatctcttagataatctgattctgctttgtctatgcgaacagccaagtcactaaactccctgttatacagattcttcaagaccggtttgagcatcttgagcttcctacacaactgaaacattttacaaccgtgcatatccatagaccaagtagaggctactgcagggaggaagtctctacaatctgccatagcattattgaatctaaaggcacaatttcctctgttcatgttaggcttcaagtgaacaattagagcagcatgatctgagatagaaataaagtcagcaaccatgacataggaagaacgaaaatctgccatccattgatggttgcaaagggctctatcaattctactccaaacagagccattcgtccaagtgaagtcattgctcgtggttctcaactggagaaggcccaaatttgagcaacaattgttaaagtctgttatctcatagtttgtgatgttcgagccattctttctgtccccaagggaacgcacactattgaaatctcccaatataacccaaggacctttcacttggtgagcaacctgatacagggaattccaaagctgtcttctctctataattgagtgaagtccgtacacaaaagaggcccacccttgatacgtagagactttgctaacaaactgacaataaatcccttgagagttgacatcaaggatattcatatccaccctatttgccttccaaagaagcaaaatcctaccagctctatgttggtaaaagttgtgagcaaaagaccagcccttgaatttcttactcatcaaagctgttaagaaagacacacccatcttagtttccaaaagagccactatatccacatcattggatctcaaaaaattaagcaccgcccggtgcttcaagggcatatgaaagcccctcacattccatgaagagaggatcatgtctttatccgggaagaaaccttcccatcaaaagtttgcaaatgctgattcttctttccaatgccaatttgaagtggcctatgtataatcttgtttttaaacatcgaggtagcttctttcttcctgcccttcctttttggtttaataaagccaaggtcatcctcatcctgggcattcttagggttctcttcagaattaacagtcaaattctcatggttgatttgatctatcttttctttccgcactgcatcctctgcatcctcttctatggcaatacactggtgatcatgctctgcctctgctccaggcttcgaagaattttccttgtccttctctaaggactctccatctggttgtggcacctccacatgatcatgctgcttctcaactgcctctgcttttgccttagccttctcctttcccttctgtgactgaaattgttggaccacatctttggtttgttgaaatccacagctactattagtatgccctatcatattgcaggccgtacaatatctgggtttgttctcacactcaatggattgttcaaatagagaaccatccgataggaagaattcaacttttttcaggagtgggtttggaaacgtccacctcaaccaatactctagcataagctagcgacccaaactcttttgtgatcctgtctgttctgataggagtccctactggcgataggatcttgctcaaggcattttgggaccaaagtctcagcggcaaattgtggagtttgacccatactagaactttggtaatctcctcatttccaaatggaaagaattcaggcattttcttcaacagaataggcctctgaaacacgaaataaggccctccaaacaacacctcctccaggttttcattcaaatcaaactggaaaatcagccatccacttgggtgaactgaatatttgaagggcaccccccatttgttacacacttccataatggcctttttccctggaaatcttccagctacgtagccaattgcacagaatccacacgcattctgcaatggcacacaatcatcttcattcaactggaatttctgctcagagcattcttccttctttgatagggctagaccagcagaggggtctcgactgttttgaaacagacttgaccaagggggcttggtggtgggctcggttgaaggttcagtatcatccaacttgggattttcttcctcatttcctactgaagacacgaagtcctccactgtcactgaacgggtatcctcattacccaaagtcacggagacactcagagattgagtatcaacagggcttgtttgaggcgtatcgtctaacacttggacggcatccggtgtggactctactacaggcctcccattctgttgttcttctctctcgggcaaaacaccaaacacttggtgtgcatcaaagacaggggtttcaatggtgtctactgagctgcactcatcaaccacatctttccccttcactcccgaaccctttttccccagttttttcttccctttccccatgatttacaatcctgaggtcatggaagcatcgagaaaatagaggagaagagaaactgcaaataaacccagaggaacagtccaggatctctgttccttggagatgaaaagaccaatcaagcaacagctctaggctggttacaataaaattcacagaatacacagacatgatggcaagcaacaaataaaattacaattttcactacaacaagaagcagaaaagaaaacagcagcttccaataacccgcccgttccgtctcatctatgcaaacagagcttctccaaaaacctcctccggtgggaccgcaagaggagctggaagatgacccaaagcttgctcaaactcgaacaaagagaaaaggaatcgcttgtcgaggagtactggcccttcgataaaacccagcaccggtaaccctagcgctgcctcagcttaaacctgagctggatgaggatgggtgagggccttcgtcttcaacaggtgagcaaaacccagggcccagctgcggcgacagagcttgctggagagtcctctctgggtcgcgataaaactccagatactcgagctttctggagccttcccaagagcagcgcttcacgatacttccaaggaaaacgaccggagatacaaggaacaggccgccaccaagccagcgtccaccgccgccactacatatctcgacctcaaacctcacaaccttatggtgactgttccttccactatgtactctagagaagcaaaaaggaatgaagcggaagtcactacggccttcgtaaaggagattggaccaacacctccacgtgtcagctgttgataaggaacatcaccgcccactccacttctccttagcgccaacaacgaagacggaaatgaagaggcttagaccctcaatccacgcggcaccaaacaaaaggagaagctgtcggccacctcactatccacccaaaccaccaaagaaaacaaaaccctctcaataaacaaaccgtcacccacttcacaggagattagtgaacgtatgagcactaaagtatctccaccagcctcactccgatggcctaagccatagggacacacccaagggaggggaagaatggaaaccctagcagactctctctctctaacctctctctagttggtgacgacttgcatccgtcccaagaaagcatcatgttcttactgctgcacatccgtctggtttgtctgcaaatagaggcttctttggctgcaggtaaggtggttttgcattaaaatttaatctatgtcaatatagcagtgcatgttcaaacgtctaactgttctgcatttataatatacaaccatgcattcatgacctttaagtttatgtaaagaataaggatgcgagaattggctaactgctagtgaagaactgctgaattgaagaaatatattcaacagagtgctttctgtgagcgtgttaaagtagtttgtttgtatgatacatggcattttatagcttgtgtgacatttattagttttttgtttcaaaatacttccttctggagtctgcaacgttcaaaaattggaggactgtaaatgttggaacatttagggtgtacttgtttgagtaagtggaaagtgggaagccgaaaagtgaacgtatatttgaacacaataaaagcctagaatacattgtcattttctttcatttgcatttttatctagaattgaacttcttacacactcaaccaagctcactattagcatttgaaaatcaatgctggatttaaactgaatgtatttattttttcattgtatttagtagtcactagccaatgaaagaaatattagcatgcactactatgaactatgaaggctctcattagtcattcacagagtggttgatgtaataacatttttaatcaagttaattaaggtcgatgataaatgaatccaattatagatacgaggagattgaagaaaaaaagaagataaaagaatagaaacgggaaagaaggagggggaagatgaagaagagaaagattaaaaatgcatcatctaaaacataaatataacaataggtctaactttccaccaaatttatgatttttcttcattctgtcataagacaccgtccgttaatctatatctcactccattaaatcttgtttaaccaccttttctcatgtaagttttggtctacctctacttctctttgtgtcgagctcttggtaacaaacttttgttcttacgggagcagaccgtctcattacgtttccaaaccacctcaatctatgtttcctcatctttttactcatcggtaccactgttaccttgattgaatatcttcattttttatcttattcatctttgtataaccacatatccaccttaaaatcctcgtttctgctactcaattttatgctcacgctacctatgtgctgcccaacattcaactccatataatattataggtcttacagttgtcctatagaattttccttttagcttaagagaaattttacgatcacataacaacctagatgcacttcatcatttcatccaccttgtgttgattctatgatttacatcctcatcaagctctccacctttttgcaaaattgatcccagatatctaaaagcacctttcctgggtacctcttgaccaagtagatgcacgtggtcttgatcaccatctgttactagtgaaaactcacatttcatatactcagtcttacttcggcttaacgtaaatcctttaaactctaaagtgtttctctataattcaattttcctattaacaccattttttgtctcattggtaagcataatatcatctgcaaaaggtatatatcacgacactttctcttgaatattttttgttagttcattcataattaaggcaaagagataagaactaagagctgaaccttggtgtacacctatcatgatagaaaaataacttgatgttccattataaactttcacacatgtagtagtctcatcatacatatccttgattgtatttatatattttaatgatatttttttcttctcaaaagtccaccataaaaattttattgggatcctatagtgtgctttctcaaaattaatgaacatcatatataagtctttcttcttttcttgacacatttcctaaaaaaactaataagaagaataatccttaagtgaatataatatatattagtccaatcaattaagaatttaacatatcttaaataataataaagtttgtattctattataaatactatattatattataaactactaaaaattattatttattagaagtttaaataattacaaaaataaaaataaaaagttagccccttttgatgaatttctagatctgtttctggttgcgctggtgtattgaagtcagcaactcatgcttgttcagaaatgtgacctttgaatctgattgcttggagttaatggtttggttggcagtacagacataaaagaggtaacacttatttccaagccattttggaggactttgctcttttgcttagtcaaccaaatactttgtgcgtgtttgatttatcattgggagacccaaacgactgctgaatcaaaagttatgaattctaactttccacaaaacgtgcgtaagaatgtgtgagcgttcaatctaacattaaaccaaacatacacaaagtctctaaattaggcaaacagaggttgcttgtagtctagcaaatttagcctatatgtttaaggataattattggggtgttgcttcctgcactttctaagttgtttcccacactttttcaggaatgtttttttgacctttgggattgatcattttagaagccagaaaataaagtgtataattttacattccagaaggaaaaaagggagtgtaggaagcaactgggtaatgcaggaagcaatacctatttttcagatgtactgaatgctatttttccatgttgaataatattagcaaactttgcagtatttatgaaatcacttaagcccacaattttttttgctgaatacaacataggtaggcaactttcattttctcctacgaacccaattcgtgcctcttatcagctgcaatgccgtgtactccttctactccagcacttctcaatttctacccacaccagcaataagcgtatacactcactcatacatggcttaatatatttatgaaaggaaaactttatctactattttttactaacagaaatgctgaatcaaatagagagcatccaactccaaatacttcatcacaattatagacacccccccgtgtattaataattatggagattttactaaataatcctattaaactttgtgattacttctcagaagtgacaaggaacactaaaatttaatcataacataagtatgactagttttacttcaacatatcttcaagcctcatttacaaataacataagtataactaatttcaagaacaacaggttgccaatctgtaatctacaacattgatttgtattattaatatatctttagttatcattcagagtctccacattgtgatggccattatgaaggctccacttttttgattttaaggctcacaattatacaaatatgcacatagaccctgtttaattacagagcaccactaaaatttcagcaggctgaatttggattattaggatttgactacttaaacgttaaaaaaaaaaaaaattgcaccgaaggataagtggtatgcaatgttcaataaaattattcattgcattggcttatatacaagaagtaaatgacaagtgactatgctattcgtggctgaaaacttgatggtttacagcaagtaaagaaagaacatcaaacaaaaaatgaagattcaaaaaacaactaacaataataataaaatgaagaaatagtaaatagaggctgataaagaatttatttgttcactcaatcaccaatgcaaagttcaagaagtgtcttcattgcttgctttttcacaaccttcccaaacacatctcttgccatctcgaaaaccttctccctctcaactactccaccaccatttttcttccactcttccaccatcatcttaagcaacctgtgatcccctcccaccacatcactgatgctatcaagcccagcttccattgtaggaatcctccttccccatctcttcattgccctctctgacctataagcctgagaatatgcttcccaaaatgaagccctcaaataccctttctcctttcccctgaccttcattctcttcatttgctcctccaacttgaacaccacagcccccgcatccatccctctctcaataccaatctcaatctctcttatttcttgctttgagaacacctccccctcaaacctacacctcttgcacttgcaatgaatcccccaattcactgacatctccttcctcttgctcaaaccacacaatgggtcaaaataagcaaaagtaacctcctcaccagccttcaaatccttggaagcatgaaccaccaagtagtccccaacatgcaacctcctagcattgggaacacaagagtggttcacaaaggaaggcaacaaccacaaccctacaccataacaatcattccccctcctcaacacattggctgaaacagcatcctcagtgagagaattcacatccaatatcccaaccaacttaaccatatcgacaacttcaccatcatcatccttctccacactctcaggcctaaagagcctcacatcaagcacctcaagctcatcctcattctccccacaagacaacctagtaaccaaaccctttgtcttatgacacttcccaacaacctcaaaaaccttgtcaatgaaattcttccacattgctaattgtgcatcctcacaaagatcctgaacccctcccattatgatactcctctccattgcaattgccttggtgaccaaaatcaacgacccggcatcaatgttcttcgtcacaaacaaccctctcccactgatctcagattttctaatctccacattaccaatgtgttcagccagctccggaaccttccctttgaacccacttgaaacccaatctgaaagatccaaacaccccgttttcgacaaaagctccaaacttttgcatctttccatgtacccatttacgatttcagcattcccatcgatcgaagcacttctgaaacactcgagagcggaagaatagcgattgaggcttagcaagatcttacctttgcacaaaagggtcttcgaatgtgtggcgtcgagttccaaagcgtgattacaatcatgaagggcgttgtggtagtccttcaatttggattttgcttctgcgcggttgcatagagaaatgcagagggatctgcgaaggttttgggttgggtgagaattatgaaagaggatttgggtgcagagagtgatgaagtgggaataggcttcgattgaagcattccattcttctctgaggaaaagctctgtggctttggatctgagctcttgcaagtgctcttctaattcttctgatgctgccatttctaactggggtggcttctacagttctgcctctaccaaatcagaaagaaagagtcttttcaaatggagctgtgcatttcaaaatcttttttttctctaccaatgtaacggtcacattggtttaatttaaacttttatgatttttctcttcttttttattttttttatttccctccttgtgcgtttgagaattgagaaatgcaaccactcataaatggaatattaatttcatttattaatttgccaatgttgattgtaggtggaagtggatcttagtttggattttttttaaataatatcttggattcaaattttataaataaaaaaattggaaaatattattaggagtgacataagttttctataattattatgtgaatattttacacttataatataattatttgtttataggtttaagtggatctcttagttaacaatattttgagttgaaaccttgtaaatgaaaaatataacttaaaaaggaaaatgttattagaagtgactattcaagttttctagtaataattaattattaataaaatcaataaatatnnnnnnnnnnnnnnnnnnnnnnnnnnnnnnnnnnnnnnnnnnnnnnnnnnnnnnnnnnnnnnnnnnnnnnnnnnnnnnnnnnnnnnnnnnnnnnnnnnnnnnnnnnnnnnnnnnnnnnnnnnnnnnnnnnnnnnnnnnnnnnnnnnnnnnnnnnnnnnnnnnnnnnnnnnnnnnnnnnnnnnnnnnnnnnnnnnnnnnnnnnnnnnnnnnnnnnnnnnnnnnnnnnnnnnnnnnnnnnnnnnnnnnnnnnnnnnnnnnnnnnnnnnnnnnnnnnnnnnnnnnnnnnnnnnnnnnnnnnnnnnnnnnnnnnnnnnnnnnnnnnnnnnnnnnnnnnnnnnnnnnnnnnnnnnnnnnnnnnnnnnnnnnnnnnnnnnnnnnnnnnnnnnnnnnnnnnnnnnnnnnnnnnnnnnnnnnnnnnnnnnnnnnnnnnnnnnnnnnnnnnnnnnnnnnnnnnnnnnnnnnnnnnnnnnnnnnnnnnnnnnnnnnnnnnnnnnnnnnnnnnnnnnnnnnnnnnnnnnnnnnnnnnnnnnnnnnnnnnnnnnnnnnnnnnnnnnnnnnnnnnnnnnnnnnnnnnnnnnnnnnnnnnnnnnnnnnnnnnnnnnnnnnnnnnnnnnnnnnnnnnnnnnnnnnnnnnnnnnnnnnnnnnnnnnnnnnnnnnnnnnnnnnnnnnnnnnnnnnnnnnnnnnnnnnnnnnnnnnnnnnnnnnnnnnnnnnnnnnnnnnnnnnnnnnnnnnnnnnnnnnnnnnnnnnnnnnnnnnnnnnnnnnnnnnnnnnnnnnnnnnnnnnnnnnnnnnnnnnnnnnnnnnnnnnnnnnnnnnnnnnnnnnnnnnnnnnnnnnnnnnnnnnnnnnnnnnnnnnnnnnnnnnnnnnnnnnnnnnnnnnnnnnnnnnnnnnnnnnnnnnnnnnnnnnnnnnnnnnnnnnnnnnnnnnnnnnnnnnnnnnnnnnnnnnnnnnnnnnnnnnnnnnnnnnnnnnnnnnnnnnnnnnnnnnnnnnnnnnnnnnnnnnnnnnnnnnnnnnnnnnnnnnnnnnnnnnnnnnnnnnnnnnnnnnnnnnnnnnnnnnnnnnnctcctcctttatcctggcttgggacaggccatgcatgcatacacacataggcggagttataaatgtctaattatattttttaataattaaagttattcgttttcaaaaatataattaaagttatttaatccttataaaataatcttttatggcaaaaattttgaaactgaataatgattgtcttgatttatttttttagagggattgacacgatttttattcttcaattaaagctcaataaaaaaatatggcaatcaatttttttatttcccaattctatctattaatcatttaatataatcatgaaaaattaataaattcaataggtaggatcatcatttgttattgaatgaataatgtaacatctaacatttttttttttgtaaaccattacattaagtggtctaaagtttgttttctgaacataggttttcaagagatgagtcttaagctttatggtgtttggatacaagaatgtttataaatattatattatattttatttcaaaaaataatacataaatggatcggttgaatattcattcatgaaaaataattaatagatgatttttggatggtttttttatttattaaataaatcatagacaaatttttgtttcttttacttctttaacatattgtaaagtactcttagagtatgtttagatagggaaattaaaatggagaaaataattatttagaggatttaaaattctttcctcttaaataatttgtttggatactaaattagaaaaattttaaaattttggcattttaaaatggaatttgtttttaactaaaatctagaattctaaattttnnnnnnnnnnnnnnnnnnnnnnnnnnnnnnnnnnnnnnnnnnnnnnnnnnnnnnnnnnnnnnnnnnnnnnnnnnnnnnnnnnnnnnnnnnnnnnnnnnnnnnnnnnnnnnnnnnnnnnnnnnnnnnnnnnnnnnnnnnnnnnnatttcaagaaaataatagtatttaattgaatacaattttactaaaacatttttattctcttttttaatttcaatacatatattattaaattttttaagaaaataatatttattagattgcaagattagaatatatacttaaatattttattaagaactaagagcatcaatcaatttaaaaatatttttaaagattaaaactatagttattttggtacactttggaacagagagaataacatctaggttttgaaaaggatacacaatgagaataaatttatttgggagactaaaatatgaagacaaataataaagcattgctccatgaataactgagctaattaagatgtaaaaaaaaaataactgattcatgacatgaacaagaatctcaatcttttcttttcttggcaataaaacaatattttcattcttttcaaaatatttattgtttagaaattaaatttattttactcgtgacaatatagattttttttatagatcgtgacaatatagataagacatgaatttctttaaatttatcattatctctaaatattttttgttgaatgaaacgagaataatacgaatgaaccagtaaaattttatannnnnnnnnnnnnnnnnnnnnnnnnnnnnnnnnnnnnnnnnnnnnnnntgcgtttgagaattgagaaatgcaaccactcataaatggaatattaatttcatttattaatttgccaatgttgattgtaggtggaagtggatcttagtttggattttttttaaataatatcttggattcaaattttataaataaaaaaattggaaaatattattaggagtgacataagttttctataattattatgtgaatattttacacttataatataattatttgtttataggtttaagtggatctcttagttaacaatattttgagttgaaaccttgtaaatgaaaaatataacttaaaaaggaaaatgttattagaagtgactattcaagttttctagtaataattaattattaataaaatcaataaatatnnnnnnnnnnnnnnnnnnnnnnnnnnnnnnnnnnnnnnnnnnnnnnnnnnnnnnnnnnnnnnnnnnnnnnnnnnnnnnnnnnnnnnnnnnnnnnnnnnnnnnnnnnnnnnnnnnnnnnnnnnnnnnnnnnnnnnnnnnnnnnnnnnnnnnnnnnnnnnnnnnnnnnnnnnnnnnnnnnnnnnnnnnnnnnnnnnnnnnnnnnnnnnnnnnnnnnnnnnntcctcctttatcctggcttgggacaggccatgcatgcatacacacataggcggagttataaatgtctaattatattttttaataattaaagttattcgttttcaaaaatataattaaagttatttaatccttataaaataatcttttatggcaaaaattttgaaactgaataatgattgtcttgatttatttttttagagggattgacacgatttttattcttcaattaaagctcaataaaaaaatatggcaatcaatttttttatttcccaattctatctattaatcatttaatataatcatgaaaaattaataaattcaataggtaggatcatcatttgttattgaatgaataatgtaacatctaacatttttttttttgtaaaccattacattaagtggtctaaagtttgttttctgaacataggttttcaagagatgagtcttaagctttatggtgtttggatacaagaatgtttataaatattatattatattttatttcaaaaaataatacataaatggatcggttgaatattcattcatgaaaaataattaatagatgatttttggatggtttttttatttattaaataaatcatagacaaatttttgtttcttttacttctttaacatattgtaaagtactcttagagtatgtttagatagggaaattaaaatggagaaaataattatttagaggatttaaaattctttcctcttaaataatttgtttggatactaaattagaaaaattttaaaattttggcattttaaaatggaatttgtttttaactaaaatctagaattctaaattttcttctaaaaggtaggaattctaaaattcctccacagttttgttgttccccggtgccactgtgaaaggaccttcccccatttttcaaatctttaccctctgaaatttagtaactgatttagatgcgatagacggaggagaaagagggaagatagataggctcggtgtcgtgccatcgcagagacgaaggtggtgggcaaagagggggtagcgttggagcatttggttgaaataggagagggaggaggagtaatggttatgggaaacacgagaggggcaaaggcgtagatgacatgtggtggagttgagtaacaaatggtccttgtgcattggttgcgctgtttggcacctcctaccatgagtaattgtttctaaactagagaaattacaataatcatttatcagtttatttaacatgcattaataaattataatactcttatttctttatttatttagatggaatgaaaataccattattgttaaggtaagagttaatagtttttttgtacaaattttacaataatgtatagtaggagtatttatcattttgagatggattaaagaatttgaaattgaagaaatttaaattggtttatccaaataaggaattttaaaaattcaagaattttaattgatgtatttcaattaatttcaaatttcttgaaattttagaatactccatccaaacatattgttagtgattttaattataagtcttgagttattttatggttgtcatttttatatcagttgttgataattctgacttaggacactagatgagtccaggaatgtgttttttcacaatccactatgttattggcatggtttcattaagagacaaatcaatagtgttgttaatgaatcggttagggtggttccatctttgcttggtctctatacattctaattgtatcgtgttatttattgtattgagaatttgattataaattaaatgatataagtatgtttcagtcagaaaataaataaataaaatagtaatttacttttaaatcatccattatatagttcagttcaaatgttatccaattcatgtgtacgtttggcattcctaaggacatgatgataacaactaacaacgggaagattgagttgagtttatgattatggagatttagttattgttatggaataatagttgggcctaacattgaagcccaattactcttaatacaacgtgtgtttaacagattcaatgaatgtggactatgacttggtctactggaatagttatgaacgtgcaggttgaggccgagaatatagggagcatttcgtgtgcagttcagatcatttaaccgcaaggtaatgtgcttataaatacactggtataagcacccgaaaggtacacacacattctgactctatctctttcaattacacaaagcacacaccccacgtccattggtggtatttctgtgtgatcatctacttcaaggttttcattctccattgatacccttgaggttacagagttagcattgatccaacagcaataatacagtacattcatgctgtacagttgtgttctggaaaacaagcagaacattggtgccgtctgtggggaacgttaaatttcgagtcccacgtccagtaatggtgaataccagaaacagccattctgtcccacgttctgagatgccaaacagagacttggtcatcccgaataatcggaatgtggcgcagcgagaggaagtacatgtgacggaggctctctctgacgccgcctcttcccccgttcaaacacagcaacagaggcaaatcccgccgcggagaatagtccaagaagaagagtcagaaggccattttgtccataatgctcttaattcaattctgagccggattgagagcatggagaaacgacaaaacctccagagacaggaggacatccgaaatatcacacgacaattggaggagcgaaacgaaaaatggcgacgcgctgagacaaagcgagtagaacagttggagttgagattacaacagatggtgacatgagtgcacacgttgggccgcgaggagcaaccaccgtcttcagcacaagatttgaggatacatttaaatcaattaaggagtaccgagcaaggagaacaacagacaccagcaagagaagagctgatccgagtacacggaccaaccgggcataaaaacgcccataccggaaatttgctgagtggtgcagaggatggcggaaatccgactggccgagcagaaaatgcagataaccagcacatccgagtagaaaacgcaaatccctctagtcgcgttgaacatgtgcgacaggaaggcgaggaaagccaacgcatcaatcaagaacacccgggtaggaacgtaatcaatgaaccagacgcaggcaaaaaggcggggccagtttatcgtcgcaaatacagccgaggacagcaaaataacagcccttttgtagacgaaatcgttaatgcaagatacttggatgatttcgatgggtccttcttgtccaagtacgatgggacacaggacccacaagtgcatattgacgagttcgatttgtaaatgtgtgtccggggcatcgatgagcccatcatatccagaatttttgtgaccaccttggtgggaccagcacagacgtggtttcatacgttgccgccgaggtcgatcagaaatttcgaggacttcggccagaaatttttattgaactttgcgactagtaaaaaacagcccaagtccgagttcacattggggaaagtcagacagctacccggggagacattgcagagttacttggacagattcaaggaggccgcactgcaagtacaaggattggaggagaaggtacacgtttacctgatctctgctggactgaatggctcatcaaggtttgccaagtccatttacaaagacccagtaaagtcgttgatggagtttcgcgcccgagcaaagaaatatttggagttggagcagatggaagtggttaataatcaaggacgacagaaggatcgaaataacatgactccgcccccacaaaataggggacattctagcaaccgaggacgaaataacgacgtgcaacctaggacgggccgatatgagaataaatatgataggtacacgccgttgaacgtttctcgttcacagatctggaaggaagtagcgctcactgaaatgaagaaggttgaacgcccccggccaagtttcaacaaggccggtttggatcattcacgattttgtgaattccataatgggcccgggcacacaacagaccaatgttgggatctgcgagacgcgatcgagaaatttatccgagaagggagactgcgacagtacgtgattaaaactcaagggtggaaaaataagcgaaagcccgaggacagtcagtacgataaaaaaggtgatcagaagaaaatacgaagagacgatgatgcgttcccggagcccgagtttgaatgtaatgtaatatccgggggcatgggcggcggaggcgatactaccagtcaacggaagaagtatttgaaggaagtgctgtcagtccgaacacaacccaaatttaaaactcgtacagaagaaccagaacctccactcttgtatttcacgaagcaagacatggagggagtggtacccgggcatgaagacgggttggtgatatcagcaacggtcggcaagtgtcgagtaagaaagatgttcgttgacaatggaagttccgccgacataatcctatggagcgcatttcagaagatgaatttgaatgtagatgaattgaggccgtgcaaaactatattgatcggtttcaatggtggaaacacaaatgtcaaaggatccatccgcctgcggctaaccttaggaaccagagaagcttacaagtcagaagaagtgaaattcgtcgtggcagactttccgtcccaatataatatgattttgggaagaccgaccatacataggtgggacattttaatgtccatgaaacatcagaagcttaagttcataaacggcaatggtcaagtgatgaccatatgcggagatccgaaggaatcccgacagtgttactatgacaccgtgcgggaaagtgaatatagttctacgccaggacggtggaatccgagtagaatccgggaagtaaaggaaatcgataacgacagtcgggtacgctcagtaaacgtagtagagctggatatacgagaagccccagacgaatggaggccggagccagtagaagaagtggagcagattcagataggagatcaagttggccaggtgactaatattggccgagcaatggagcccggacaaaaggaagcattgatccaatgcctaaagaaaaaccgtgatgtatttgcgtggaaggcatcagagatacccggtatcgatcctgagttttgttgtcataagttagccatatatccggggtcgaagccaatagagcagaagaagcgaaaactggggccggagagaacccaagccctccgagcacacattcacgaactgttacaagccggtttcatacgagaaatacagtacaccacttggttgtctaatgtggtgatggtacgcaagccaaacggaaaatggagagtatgcacggattacacggatctgaacaaaacctgcccgaaagatgcatatccaatgccgagcatagatcaactagtggactgctcttccggatacaagatcctttcattcatggatgccttttccagttataatcaaatcgcaatgcatctagacgaccaggagaaaacggcctttataggcgacagggccaattactgttataatgtgatgccattcgggttaaaaaatgccggagccacatatcaacggatgatgaatcgagtatttgaaccacagctaggtcgcaatgttgaggtttacatagacgacatgatagtcaaaacttcagaaattaccaagcatgtcgaggatctcgaggaaacgtttagccggctgcgcaattatagcatccggctaaacccgttgaaatgcactttcggagtcagagccggaaagttcttgggcttcatgctgacacacagaggaatagaggctaacccggataaatgtcgtgctatattagacatgcagtttccgactagcaaaaagaaaatacaacagttgacggggaggatagcggcattgactcgatttttgccgaggtcggcagaaaaggcgctacctttcttcaaaatgctgaagaagcaagctgttatcgaatggaatccagagtgcgaagctgccttcgtcgacatgaagaaatctttagcgtcgccgccggttttatcaagaccggaggccggagaagtgttgatcctatacctgtcaataggcgacaaagcggtgagtgccgtattcgtacgagagaaggaatccacacagaaaccagtatattttgtaagccgagcattgcgtgattccgagatcaggtatcaaaaactagaaaaactggtcttcgccctgatcgtcgccgccaaaaaattgcgcccgtattttcaaagtcataccataattatacgaacaaatcagccaatccgacaagttttacacaaaccagacctagccggaagaatgaccaattgggcaatccagttgtccgaattcgacttaaagtttgaggcccgcaacgcgatcaagtcccaggcgttggccgatttcgtccgagaactcaccccgcacgccccggaaacgggagattggtggacgttatacgtggatggatcctccaataaaacaggaagtggggctggaataataatcgaaaatccagagggggtggcgacggaagtatccttacaattgaacttcccgacgtcgaataaccaagccgaatacgaagccttgattgccggcctaatgcaagcagaagaacagggagccaaaaacgtgaaagtgtacacagattcgcagctggtcgcggctcagattgaaggtcgctatcaggtgaaaggacccctgttggcaaagtacttgggccgagtgaaggaattgatatctgactttgatgaagtcatgattaatcatattcctagagaagaaaatgcccgggcagacatactgtcgaagctggcgagtaccaagaagcccggaagtaatcgaaccgtcattcaacagcaggccgtacagccactgtgcgtaatggtgatcaccacggagcatgattggcgacggccaatagtaaactacttagaaaagggggcattaccagaagacgacgtggaagctcggcggctgatacggacgtcgactatgttcacaattgtcgacggagaattatataggaaaggattgcacaaccccttattggtgtgcgttgctcccgaccgagtagagtatatcttgtccgaaatacatgaaggtattaacggacaacacatggggggcagggctttaacaaggaaggcactccgggccggatattactggccaactatgagcgcggatgctgccgagcacgtgaggaaatgcgaaagttgtcaggctcacgcctcaaggatattgtccccacctgaagaactgcaatctatctcggctccatggccatttttcaaatggggcatggacctattgggcccatttaggccggcagagggacaaatgaagtggttgatagttgcagtggactattacaccaaatggatagaggtggctccattggctacgattacgtcgatccgagtacagaaattttttgaaagaaatatagtcgccaggttcggaatacccggagaagtaatcaccgacaacggaactcaattcaccgatcaaggattccgggacatgatgaccgggtttcatatccggcatcgattcgcttccgtagagcatcctcaatccaacgggcaggcggaggcggcaaacaagacaatcttggaagctttacgaaaacggatgcacgacgccgggtccaattgggtagaacagttgtactatgcgctttggggcatccggacaaccactcaatcgtcaacaggtgaaacaccgtttcaaatgacgtatggcagtgaagccatgatacccgttgaagtcggccaccattcgtggcgacggacacaagtactacgagaaggcgaggaagtaaacaacgacatacttgcattggaatcagccctcatcgacgaaatccgagtatccgcccacgttcgggatctacgggcaaaacaactgatggcgcatgcgtacaacaagaaggtaatgcctcgtcagtttgcagtaggcgacttggtgttgcgacgagcagatattggaaacaagaatgctcgcgacggaaagtttgcagccaactgggaaggaccataccgagtaactcagaagctcgacaaaggagcgtatatgttggaaacattgactggcataccgatcaaacgaacgtggaatgccgataagctcaagaaatactatagttgaagtgaaattttctgttattgagagtatgaacttaggtgcgatacatctgagtacatatggttctctttaatcgaaaactctaccagtttattcagtatgatcggaccttgtatttccgagcaacatcagttcattttcgattatgttactaccgttgtaaatttggagattaacaatctttcttgagagtatgggccgattctgctcggcacatatggttcttattaagatgttataatttaccggtataaataaaattgttattctccacacaatttaccgaatacatttttagcgctttgaatgatacgctaaccgactctgatcaaatcggtcaaggaatatatccgatagcggagttgttcaaagtaacattttaacttagtgagaattcaagtttcccaatataattcgaatatcctatatggtcgttggaaccaagactacgcgcgcgcgatatatattaccgagtacaacgaactcgaatgaaaaacgaacattgccatataagaaaaaattatgttccaggcccgagggcctaacattcaaaaagaaaaatacaaatcaaaccggcatcccggcccttcatttttgaggttgatcctcggtgacaggaacggggtccgtggaaggtgacacaaggacggtaggtgcagcaccagaagaagcttcatctatttgcactgcctcctcggcggctactaccgaggaatcttcagccccggatggaggaaccaaacggttctcgtctacataagctaagtaatgcatcccggttgtgcaaatgttaacaccgggattcaaaaacttaacctgatccagggtgttattgaaagaatcctcggctgcagcagcaagagtggccttcatctctgaaagcttttcctcgtgctcgaccttcaaggagtcgatggtggaggataacagcgctgccttctgctcggaagcctcgaggtcaccttgggcccgccccagatctgctcgcagcgacgccgctacggcttgcacggagagtaggtcctcttttagcttctgaatttcagcagcagacctttctttgtcctccccatgagcagcctgggcggcaaggagagcttggtcggacttctttttctcctctaccgccactccatatctaaattaaatctgagttagaatctgaaatacgaaaatacagatggagtattaatgaatacttacttgtgccgaacagtggcaaaggcccgtactagagaagcacattgataagcgttctcttcaacacgaaccaacgccgcaagctcatctcccacgggggcacccggttcaaggagataactggggggcttggtaatcttgaccagctcctcggttaccctcttttcccaaacgttccccgtcatggccaaagacccacttcgcccggtctggatagcggaagtcgacggagaaacacgttccctggcagtggagacggggatggccgcggtcagaatcccccgagaagcagttggaggagtagaaagcctaggaacggcagtttttttctgaaccttagctcttttattttctccctccaacgctactcggaaaggtggaggacctcgtttttgccccttttgtggcgctttatttgtgggctcggttggcttcgggtcggcagcggctgaaccagatggttgacccatgttaactgcagtggatgagggtatattagatacaacattcaagataaatagtaaacaaagtacttcgagagatgtaattactgtaggcggaggagctgccacgagcacggcggacatagacagccgcgtggggcggtcctttagtatcgagatactccgaaatcacggagatggcggaggcctcagaatcggataatgactcttcgatgaatctataattagatctatcctcccgataatggtcttgcgaccaatacaatgggaacgaccattctacttcagcagactcatccccccgaaggaaaaatggtcgctgcccgggattggctgcgactttgaagtatttatcttagaatccccggaaggaatccgtaaacggaacaatcagtttccgtttattttgactccgtagggagacccatcccttacgctcggctggttctttacccgtcctaggagtgttcgggtaataataataaaagaagagtgggactgtacaggggatccgaaggtcttcacagaataactcaaaggtcctcacaaatccccagctgttcggatgaagctgagaaggagctattcggagatggtttaatacttccatctcgaaagaggtaaaggggaaggtcactcctatctgagagactacaccctcatagaagaaaaagaagttgggatcattgccctctctgtaggcacaaatgggctcacccgagtagggagcccggaccccaaacccgtcctgtttacctaaggggagtgaggctatagtggatagttctagagtggaaaaggtcctaagaatttcgtaggtaacccaacgaaatatggaggccaatgcaggagccgcgtccgactcggactcggcagacagagattcatccacaacctccacggaatcatccattatacctacgaaaatataaaaagaaaaccagagttagtacacatacctggaaacgacgcattaaaggcagaagaggccgagaccggaaccacgcatttggtgtgcggcctcggctggagttttttggtggatgagaggatggggttatgccgacatgatcccaagatagagtcggcgatatcattggaaccatgttgaatatggtacatggcatcagaaacgcagtcaatgcaggcgtcatacttaacttccatcacttcatccgaggacgacgaaaaagtgtcatccgaggacgaagaagacaggttatcaagaggatcacaagagaccctcaagggaggatcttttgggctgatagtatttgtgggcccagaaattctggggcccaaaatgggaggagccctagggtgaccaatactcagaacagagccatttctagaaggacagattgaagagggcggaggaacaccatgagaatcagactcgcggtggtggataggtggcaacaaagagtcttgaaggggagtcacggcggaggtcttaggtggccttgaaatggaagaacctccagtatggccacgcaaagggtcagtctcgctcactccatcagggaggggaagaccccacaacaaccacgaggccctaggggccctccgccgcaactccgcctcttcctcaggagtaaatttcatgaagatacacaacaacaacaaaatgacaaagaaaaggatagagtccaagacaggaaaagaacaaagcaacgctacccttacagaaatacaagcaacagaatgcacaagtaaaaatagcggaaagaaaagaaaggtacctggtagcaagagtagtaatgtatcgaaagagatggcgaagaggcaaatttgcgaaagcttcagaagaagaaagaaaagagagaaaaactcagaaaatagagaatgcagaagatgtgacgaatgacaaggaagaaaaaggggtgcgggaattaaaggataaatttgaaatgcaataataacccacagtaaccgccaaaggaaacaaaacggcttagtaaaccgccactcatgaaacgaaacgacgcaagggcagaacggtaaaaggacacgttgatctgggggcatgaaagtaaaaacactaggatcgtaatgattaccaaagggagtgaaacgacaggcctttaatgcccagactgtcattaatgataggaatagtaactgatcctacaacaagaaagccaaacgccactagaggagtatttcctctttacatccaagtatgactcgaaaatatagcaggataagtttctattcggacaaatcctactcgacagagtacaatcggttaagtgctcggataaaatggtttgctcgggttaatatgttcgaatatttgatgtggcagattagattgttgggttagttgtgagtgggaattcctatccaaagaaatatattcggagaattctactcggatagtggtttactcggaatgattcctagccggtttaaaataaacggaagatcttatttggatctcgatgatcggatagagtctggtcggatgaattttctacacggagaagatgggacggtagggatgatgccgataggggataggagtaattatctaccacgccgtcgcgccgactaggaaattgggaagaaggtcttgggtttgtcttttggtgattattcacgcttgtcctcggtttcgagccagccgttcaggattctccataaagaagaatttctcagtgcatcttgatggcataacatgcttcacccgcctattcgtcgacaactagtctgacagtatgatcggaggcgattaacataatgcatcccggccatcaagattacttgatacccgggctggggggcaactgttatggaataatagttgggcctaacattgaagcccaattactcttaatacaacgtgtgtttaacagattcaatgaatatggactatgacttggtctactggaacaattatgaacgtgcaggttgaggccgagaatatagggagcatttcgtgtgcagttcagatcatttaaccgcaaggtaatgtgcttataaatacactggtataagcacccgaaaggtacacacacattctgactctatctctttcaattacacaaagcacacaccccacgtccattggtggtatttctgtgtgatcatctacttcaaggttttcattctccattgatacccttgaggttacagagttagaattgatccaacagcaataatacagtacatttgtgctgtatagttgtgttctggaaaacaagcagaacagttatattattgaaaaattgcttgcagtatactttttaaataacttttttattactaactgaaattcactataagttagaaaattatatggatttcaatcttaatctaataagtcatacatgcgattttatattttttttaagaaatttcatccaataattgtgttatagtaactgatttttgcaatttctatagcctgagttagtgctaaatttggtaaagatcagtagctagtgtaaactgaaggtgaacaattttttgctgattaaggagccaaattaagtggaagatgctcatcgcccatacttagtttagctactgaattctatgaatatttcagagatcagttgaaaagaagttggtggtgctgcagaactttgtgttttttgtgcataaataagcaaatatgcaattcagcttgtgcaaactttaaggatcagtttggttaaatgtatttattgaaataaatgtttattttaacaaaataagtaactttatatttttttatatttatctaaactatttctgttaaaaaaataattttttacttattttgaaaaaaaaaattatctggtttaaaaaaatacttatataaaaaaacattttaaaagaaatggtatctttcattgctttgttcgacagatggaacatgtccatatatacaagtttgtgtataacaaactaacagcagctacaactaataacaatagcaacatttgaatttgaaaatagtacaaaaaaacataacagaaaaatcataacagaacaattgcagcgctgtgatcctagctgatcctaacaacccttatcactccccctcaagttggagcatggagggaagaaatgcccaacttgcaaaccatagattgaaacactgatttgcccaaggctttagtaaacacgtcagccaattggttttctgatcgaacatacgaggtggctatggtacgatccaaaatgtgatcccggatgaaatgacagtccaattcgatatgcttagtgcgttcatgaaaaatcgaattagctgcaatatgaagagcagcttgattatcacaaaacaactgcataggagcgctgtgatcaatccccaaagagtgaagaaaagactttagccagaccaactcagaagtagtagttgccatggagcggtattcagcctccgcagaagaacgggacacagtagcttgtttcttggttttccaagagatgggagaatcgcctaacataacaaaaaatccagtagtggaacgcctggtgatggggcaacttgcctagtctgaatcacaaaatgcacggatagacaacgaagaagaagactgcagtaggagaccttgaccaggatttagcttaacataacggagaacccgaatagctgcctcaaagtgttgttgttgaggttcatgcataaattgtgaaaaagtattcacagcaaaacaaaggtctggtcttgtgatggttaaataaataagcttacccacaatacgcctgtagcgagcaacatctgcaaatgaagaaccagctgcatgactgagcttatgatttggatccataggtgaagaagtcggtttacatgcaagaagaccaacttcgtgaagcatatccgtggcatatttcctttggctaagaaaaatgccagatgcattcctagcaatctcaataccaagaaaaaactttaaagggccaagatctttaatcttaaattcagaatttaaataatccttaacagcttgacaagccttggagtcgttgccagcaatcactaaatcatcaacataaataagaatagcaacaaatagagaccccccgagtaaatgtaaagagcgtataatcagctctagattgcacaaagccatatcgaagcaaggaagaagtgagcttggcaaaccagttacgtggggactgacgtaatccatacaaggatttttgaagacgagacacacctttcggccatgactatgagagaaacctggaggaagtctcatatacacttcttcagccaaatcaccatgaagaaatgcattgtgaacatccatttgatgaagttcccaacccttcacagctgcaaccgcaagcaaagttctaacactaaccattttagccactggtgcaaatgtctcatgatagtcctctccatcaacttgatgattacttccaacaaccaatctggccttgtatcgttccacagaaccatttgagttgtatttaatgcggtagatccattgacatggtaaggcttgtctgccttgagggagaccagtaatacaccaagtgttgttttcttccaaagctgaaatttccttttgcatagcctcaacccaacgactatcagccaatgcttctttaagattacgaggctccttaccggcatcaatagctgcaaggaaggctcaatggttgggtgagaatctgtcacaagaaacatacttagaaattggataaggagtacctgagattgtgtcaagatgaggcagtgaggaagacatgtatgtgttcaaaaaataacatttgtagtctttgagatgagctggagcttgacgattgcgagcaggacgagaagcaacacttgtagaggtggaagaaacaggcataagcacctcaccagaggagaagtagagggtggctcttgaggctcttcatcaaaaacaggtgaggagacagcaggaactccccctgacgaatcaaccaaaacatccggaacaaattcaggtgcagtcaacagcgatggcttcggtgttatatcatttgacagcaaagaacattgtgccaatggaaactcattctcataaaatataacatccctagaaacaaacacagtagatgaagttaaatccatcaccttccatcctttggtagaaggtggatacccaagaaacacacatcgaactgatcgaggggcaaatttatctttagttttgggacgcttttgagcataacacaagaatcagagggtacgaagatgatctgtagagggagcacgaccatgaagcagttcgaatggagttttaccatcaagaatcttggatggtatatggttaatgatgtgtgcagcagcaagaatgcattccccccaatattcaatagggagtgaagcctgaaagcgtaatgccctggcaacattgagaatatgtttgtgtttgcgttctgctcgttcgttttgttgtggtgtatcgacgcacgaggtttgatggattatgccaagctcattaaacatccgagtcacactatttgatttaaattccgtcccattatcactccttataatttttacattacagccaaattgtttattgaccattgcgaaaaaatgcttcaatcgtgtgtaagtttcatgtttttcagcaatcaaatatgttcaaattgagcgactaaagtcatctacgatagtaagaaagtaatgagctccagaaatagaagaagtcttataaggaccccataaatcacaatggatgagatcaaaaatagcagcacttctattattactcaaaggaaaactacatctggtttgttttgctctatgacaagcatcacaagctttaacattggagctattatccttattacatggaaaaccaggtagaaaatgaagaacagaagcaggggcatggccaaaacgcctgtgccacaaatcagcagaactaaagctacgaacagcagacgctacttgaagatcattattgaacacatacacaccatcccgtgcgtcacccaggccaatctccttcctcaagttgaggtcctgcaaaacacatgttttattagtgaactgaacatgattggaagtattttggagcaactgagctatagaaatcaagttgcatgtcaatcgtggaacatataacacatttgttaattcgagttgtggggtgagcaacacagaaccccgcttggttgcacaagtaacatctccattaggtaaccttactgaaataggtggtatattttccacattgttcagcagctgtagggcaccggtcatatgttgtgaggccccactatcaagtaaccatgagtaggacaccttaccagacaacttgtcggagctgcgtgaattatccaccaaagatagaagctgattaacaacctccggagtaagaacagaatgagcagatgcagctgcatatccttgctcattgattcgggaagacaactcacgatctccacctgcttttcctttgccacgtcctcggccagtccttttgttggggtaaccatgtaattcccaacatttggaaacatgatgatttgattttccacaatgagtacatggagcacgttcaggttttatatgagatgggattatatccttcccttgcttagagggtgcctgtacagcataacctatagcatcaggacgatcttcacgtgatcgagcaatggcacgagttgtttcttctccagtaactacagcatatgctttgttgactgtaggcaattcaggcgagttcaaaatctgtgtacgaatattgccaaagacagcatcatccaatcccataagaaattggtagaccttgtcacgttcagcctcctctcgcatttgtttaacagctgcacatttgtcaccacattcacacaacttggtggttgaactggtctcgagttcgtcccatatggcacgaagcttcatgtagtacgttgccacactgagtccttgttgtttgatagttggaatactagatttcagatgatacaatctaggtatattagcaacaacatacctctctgcaaggtcatcccacaatccctttgcagtgtcaaaaaatttaataaaaggttgcaactctgggtccaccgtgttgagaatccacccatttatcatagagttgcagatgtcccacatctgtccttcctctgagttttcatcaacaggctttttaatggcaccagtcacaaatccaagtttattcttggctttcaaggcgttcttcatagccttcacccaattatcataattagattctcctttcaacaaaatatttgttaaaagaagtccaggattatcggccccacccatatagaatggtgatttagaatccaacgccttgactctattaggaacctttgatgccatgatcagagattatgtagcgaaaacttgattgtttgctctgataccataaaagaaatgatatctttcattgctttgttcgacagatggaacatgtccatatatacaagtttgtgtataacaaactaacagcagctacaactaataacaacagcaacatttgaatttgaaaataatactaaaaaacataacagaaaaatcataacagaacaactacagcgctgtgatcctagctgatcctaacaacccttatcacatttattttaattttttttcttaaatttaaacaaactcactctcaatatatatatataagtgacattcaactactgtggattcggtagaagtggcaaatttgactactaattaaggattgggtagaacttggttttggttctgatccccaaactttccatcctccttcagtgcacttctttcctatgttggatcatttccttttttggggactcattcagttacaaattggaaaaaatcaataaattttctgaaaatggtgctcgtggtgttattctgcctccttattgagctatgcgtctacagtataagttctacacgttcaaaagtttcggtcgtgttatatgcctttatctgttatagaaaaaaaaagaaaaaagtttataaggtggaaacttaatattattatttgttactaataatagtataaattaattaattatgtttttaaatttttccttatatgctgtaaagtgtttacttaattggattccatgttattatatgacaaaaaaggatatgtttgaatatttaatagaaaatgaaaagaaataaaatgaaatacagttaaatgaaatacaactatagtttactcgtagcttttgtattttctccacttacaacctatatctttttctatttatatatcattaaaccaccctaatattatagtaaacaacattataattatgattaaaactatggttgataggtctaaaactgtaattaaatcaaataaaaataaggtacagatagggttaacaataccgaataagagaagacataagaggtttataatacaaaaagaaaaatatatttatttatttacacaggcaaagtggtgttcattaaggatggtctggtggttgggtggcgcgtgtgtggatctagggaaggaggtggaagcatgacagggaactagggaagagaggtgagtggtggtggtcacacatagatgacgggatagggaggtgatggcgtgatgtattaatgatgttgttgtgtttggttgcatgggtacacgagtgatggtggctccatgaaggttcagtgaggaggtggtgggagagaggaagttaggtttttgcttagaagaaaaagaataaaaaaaggggatattagaaaatttggaaaggccacgttaagtaattgcccacatttaggtgagtgagagtggtctatgatatggttgaacacctatgatacgggtaagggtgagtgctattttctttttttttggtgtgtagagggtgagtggtctgatacaccaattcacacatacccaaaataaaataaaaaatatgattctatatatactccctttcctcataacccccctatttattttaaaagaaaatctttttgagatactctctttccccccttactgtttccttctcgcaccccctccttcaactgttgccaattgtatttgtttgtctcatttctctcacacttatttaggggtgttcatcaaccgatccaaatcgatgcaaaccgcggtgacctagccgaaaaatcgaaaattgaaataaccgaaaaccgaaaaaaaaaccaaaaattttcatcggattggatcggttttcggattggccaatgaaaaccgatccaatccaaactgatccaattgtaaaccatatcttatcctttatctacttgggcctattccccatcatagcccaaaaataaaaaatctaatacattgttccttattttgtccaatgaacatatttgtctaataaaaattagaaaataatgtttatttttgtccaatgaatgtgtttatttatgttagatactccttattttgataaaaataagtctcataagttttatttttagactttttaaaaatccaaaaaccgatccaatccaaatcgaaaaaaattggattggattggatcggatatgaaaaaaatttcaaattgaatggatgatcaaatgaccaaaccgaaggaattggatcagatactttttcgcttcaaaatcgatccaatccagaccgcgaacatccctacacttatttgcttgtcagcttccccatccttgtaaaactttagataaaaattgcaattttaatttctgaaatatatttaatgcactccaaaaaattaaatgtctgaaatgtataagcaccaaaaccaaaaaagggaagtcagtaagtgtaagatttttgtacattgaacatggtgtcagtcacttgctctttatgttggactacttggtgattggcattgtatatttttgaattgcacgtaactctccctcatagcacaaaatcattgaaattgcaagtggtagtggcgcaagttggaatgcatttattttggatggtacctttaaaaaagaaaaaaaaaatccaaaatggagagagtacggaaagaagaaggttgcacaaatagaatcctgaaacaaaaataaataaattaatatgggccctgtccatgtcctcgagccacacaacgacaccaaattgcgtgcaaggaagctcaaaatcaagagagattgaccgtactgccacatattttaaaaaaatttacccatatgccacgcctacagtattttttaccagactgccacgcgacctatttcgctggcctcagtagcgaaataggcgtctgatgtggcgtcccagcagtggctacatatttcgctggtcagggcagcgaaatatgtagtcaaagcgccagactgacatggcagaggagacaggccacgtggcaggctgtgccaagttcgcttctaggaccagcgaaataggtgacctagttcgctacgcatgctagcgaattaggtctacgtggcagctttgtcatatttcgctgtcaggcctagcgaaataggttacctatttcgctagcccatgttgcggattactacagcaccccccccctatttaaactcccaccccagcgtattgaagctgtccaattcttgtgcaaagtgagaaagctatatgtgtttgagagtgtatgcaaaatgagtggtagtatgaannnnnnnnnnnnnnnnnnnnnnnnnnnnnnnnnnnnnnnnnnnnnnnnnnnnnnnnnnnnnnnnnnnnnnnnnnnnnnnnnnnnnnnnnnnnnnnnnnnnnnnnnnnnnnnnnnnnnnnnnnnnnnnnnnnnnnnnnnnnnnnnnnnnnnnnnnnnnnnnnnnnnnnnnnnnnnnnnnnnnnnnnnnnnnnnnnnnnnnnnnnnnnnnnnnnnnnnnnnnnnnnnnnnnnnnnnnnnnnnnnnnnnnnnnnnnnnnnnnnnnnnnnnnnnnnnnnnnnnnnnnnnnnnnnnnnnnnnnnnnnnnnnnnnnnnnnnnnnnnnnnnnnnnnnnnnnnnnnnnnnnnnnnnnnnnnnnnnnnnnnnnnnnnnnnnnnnnnnnnnnnnnnnnnnnnnnnnnnnnnnnnnnnnnnnnnnnnnnnnnnnnnnnnnnnnnnnnnnnnnnnnnnnnnnnnnnnnnnnnnnnnnnnnnnnnnnnnnnnnnnnnnnnnnnnnnnnnnnnnnnnnnnnnnnnnnnnnnnnnnnnnnnnnnnnnnnnnnnnnnnnnnnnnnnnnnnnnnnnnnnnnnnnnnnnnnnnnnnnnnnnnnnnnnnnnnnnnnnnnnnnnnnnnnnnnnnnnnnnnnnnnnnnnnnnnnnnnnnnnnnnnnnnnnnnnnnnnnnnnnnnnnnnnnnnnnnnnnnnnnnnnnnnnnnnnnnnnnnnnnnnnnnnnnnnnnnnnnnnnnnnnnnnnnnnnnnnnnnnnnnnnnnnnnnnnnnnnnnnnnnnnnnnnnnnnnnnnnnnnnnnnnnnnnnnnnnnnnnnnnnnnnnnnnnnnnnnnnnnnnnnnnnnnnnnnnnnnnnnnnnnnnnnnnnnnnnnnnnnnnnnnnnnnnnnnnnnnnnnnnnnnnnnnnnnnnnnnnnnnnnnnnnnnnnnnnnnnnnnnnnnnnnnnnnnnnnnnnnnnnnnnnnnnnnnnnnnnnnnnnnnnnnnnnnnnnnnnnnnnnnnnnnnnnnnnnnnnnnnnnnnnnnnnnnnnnnnnnnnnnnnnnnnnnnnnnnnnnnnnnnnnnnnnnnnnnnnnnnnnnnnnnnnnnnnnnnnnnnnnnnnnnnnnnnnnnnnnnnnnnnnnnnnnnnnnnnnnnnnnnnnnnnnnnnnnnnnnnnnnnnnnnnnnnnnnnnnnnnnnnnnnnnnnnnnnnnnnnnnnnnnnnnnnnnnnnnnnnnnnnnnnnnnnnnnnnnnnnnnnnnnnnnnnnnnnnnnnnnnnnnnnnnnnnnnnnnnnnnnnnnnnnnnnnnnnnnnnnnnnnnnnnnnnnnnnnnnnnnnnnnnnnnnnnnnnnnnnnnnnnnnnnnnnnnnnnnnnnnnnnnnnnnnnnnnnnnnnnnnnnnnnnnnnnnnnnnnnnnnnnnnnnnnnnnnnnnnnnnnnnnnnnnnnnnnnnnnnnnnnnnnnnnnnnnnnnnnnnnnnnnnnnnnnnnnnnnnnnnnnnnnnnnnnnnnnnnnnnnnnnnnnnnnnnnnnnnnnnnnnnnnnnnnnnnnnnnnnnnnnnnnnnnnnnnnnnnnnnnnnnnnnnnnnnnnnnnnnnnnnnnnnnnnnnnnnnnnnnnnnnnnnnnnnnnnnnnnnnnnnnnnnnnnnnnnnnnnnnnnnnnnnnnnnnnnnnnnnnnnnnnnnnnnnnnnnnnnnnnnnnnnnnnnnnnnnnnnnnnnnnnnnnnnnnnnnnnnnnnnnnnnnnnnnnnnnnnnnnnnnnnnnnnnnnnnnnnnnnnnnnnnnnnnnnnnnnnnnnnnnnnnnnnnnnnnnnnnnnnnnnnnnnnnnnnnnnnnnnnnnnnnnnnnnnnnnnnnnnnnnnnnnnnnnnnnnnnnnnnnnnnnnnnnnnnnnnnnnnnnnnnnnnnnnnnnnnnnnnnnnnnnnnnnnnnnnnnnnnnnnnnnnnnnnnnnnnnnnnnnnnnnnnnnnnnnnnnnnnnnnnnnnnnnnnnnnnnnnnnnnnnnnnnnnnnnnnnnnnnnnnnnnnnnnnnnnnnnnnnnnnnnnnnnnnnnnnnnnnnnnnnnnnnnnnnnnnnnnnnnnnnnnnnnnnnnnnnnnnnnnnnnnnnnnnnnnnnnnnnnnnnnnnnnnnnnnnnnnnnnnnnnnnnnnnnnnnnnnnnnnnnnnnnnnnnnnnnnnnnnnnnnnnnnnnnnnnnnnnnnnnnnnnnnnnnnnnnnnnnnnnnnnnnnnnnnnnnnnnnnnnnnnnnnnnnnnnnnnnnnnnnnnnnnnnnnnnnnnnnnnnnnnnnnnnnnnnnnnnnnnnnnnnnnnnnnnnnnnnnnnnnnnnnnnnnnnnnnnnnnnnnnnnnnnnnnnnnnnnnnnnnnnnnnnnnnnnnnnnnnnnnnnnnnnnnnnnnnnnnnnnnnnnnnnnnnnnnnnnnnnnnnnnnnnnnnnnnnnnnnnnnnnnnnnnnnnnnnnnnnnnnnnnnnnnnnnnnnnnnnnnnnnnnnnnnnnnnnnnnnnnnnnnnnnnnnnnnnnnnnnnnnnnnnnnnnnnnnnnnnnnnnnnnnnnnnnnnnnnnnnnnnnnnnnnnnnnnnnnnnnnnnnnnnnnnnnnnnnnnnnnnnnnnnnnnnnnnnnnnnnnnnnnnnnnnnnnnnnnnnnnnnnnnnnnnnnnnnnnnnnnnnnnnnnnnnnnnnnnnnnnnnnnnnnnnnnnnnnnnnnnnnnnnnnnnnnnnnnnnnnnnnnnnnnnnnnnnnnnnnnnnnnnnnnnnnnnnnnnnnnnnnnnnnnnnnnnnnnnnnnnnnnnnnnnnnnnnnnnnnnnnnnnnnnnnnnnnnnnnnnnnnnnnnnnnnnnnnnnnnnnnnnnnnnnnnnnnnnnnnnnnnnnnnnnnnnnnnnnnnnnnnnnnnnnnnnnnnnnnnnnnnnnnnnnnnnnnnnnnnnnnnnnnnnnnnnnnnnnnnnnnnnnnnnnnnnnnnnnnnnnnnnnnnnnnnnnnnnnnnnnnnnnnnnnnnnnnnnnnnnnnnnnnnnnnnnnnnnnnnnnnnnnnnnnnnnnnnnnnnnnnnnnnnnnnnnnnnnnnnnnnnnnnnnnnnnnnnnnnnnnnnnnnnnnnnnnnnnnnnnnnnnnnnnnnnnnnnnnnnnnnnnnnnnnnnnnnnnnnnnnnnnnnnnnnnnnnnnnnnnnnnnnnnnnnnnnnnnnnnnnnnnnnnnnnnnnnnnnnnnnnnnnnnnnnnnnnnnnnnnnnnnnatggggtcatcatgctggccgaatgatggggactgcatctggtgcgtggaatgggcaacgggcgtcgcaaatatcgtctctgcataagtcgacggctgctccggcctatacacccctgtgggggccgatggcgtctgcgcggtaggaccagaatgatacatgggatatgtaggaaacgtgaaccacggagggtactgtgaaggagggtatgcgggtgcggcactgctagacgaaccttcatgaaactgggggggccagaagtactgctgcgatggtccagatgggtacccgggagctgcatacatgcctggcggacgaggaggcatctgaggtacggtgactggtctatctgccacagcaggagcacggtgatgcaggggtaacccctcgtgacgtgcacggcggttagtgcggaccaccggtggaggagcctcagtctgacgccgcacagcgggtgctgcaacctcacctggatcggtcaccctgtccatcttgttacacgcagccatgatacgaacagcctcctcacgcatctgacgaacgtcgaacgccccctgcgacagtgactcgtccgaccccatgtggacaatggtctctgcacgatcattctgcaggaataaacatttgaacttggtcaacataaaaatagtgtaaacaaaattatggtaaaacagtaaatgactgaacatactaaccacataaacgttaatagcggctcgccgtgtcatccatcgtcgtgtaacagtgtaataccattgcatgtattcactgttcaccgacaagtacccatcacgtcgcataggcgtcacatcctgcagcaccaaattatctctgtcctcccactgtccaacatgaaacccatgtctatgcctccagtcaacgtccgtcttgccggtaacggttatcgtaagcagctcactacaattaatcgggtcatctggtattggctgatcaaagccaaactgccgcaacacacggtcaggctgctgatacacacagatctcgtagcaaatcaagggacacacggccatccaacgtctagccatgtcgacgtcgggtggatgaacctcggcaactatgtcgtaaggcctccagcgtatatctctcctacgcatgacatccatgtagtgccggtatctgcgtatgtgtccgaatctggcctgtcgtgtctcgtacacattaaacctaagacataaaaattattacaaccaaaacaatgtcatatacttccaattatttattagtaccaaacagttgtattacctgtttccgtaaatctcatgctgaatgacatcctgatctacaaccgtgggaagggggggagatatggttgggaatctggcccaaacccatagctgtaacagtaatgcgcatccccccatgtcacgccgggatgccctagtccccctacataactccctatacaggcatgcaagaacagctgatccccaacnnnnnnnnnnnnnnnnnnnnnnnnnnnnnnnnnnnnnnnnnnnnnnnnnnnnnnnnnnnnnnnnnnnnnnnnnnnnnnnnnnnnnnnnnnnnnnnnnnnnnnnnnnnnnnnnnnnnnnnnnnnnnnnnnnnnnnnnnnnnnnnnnnnnnnnnnnnnnnnnnnnnnnnnnnnnnnnnnnnnnnnnnnnnnnnnnnnnnnnnnnnnnnnnnnnnnnnnnnnnnnnnnnnnnnnnnnnnnnnnnnnnnnnnnnnnnnnnnnnnnnnnnnnnnnnnnnnnnnnnnnnnnnnnnnnnnnnnnnnnnnnnnnnnnnnnnnnnnnnnnnnnnnnnnnnnnnnnnnnnnnnnnnnnnnnnnnnnnnnnnnnnnnnnnnnnnnnnnnnnnnnnnnnnnnnnnnnnnnnnnnnnnnnnnnnnnnnnnnnnnnnnnnnnnnnnnnnnnnnnnnnnnnnnnnnnnnnnnnnnnnnnnnnnnnnnnnnnnnnnnnnnnnnnnnnnnnnnnnnnnnnnnnnnnnnnnnnnnnnnnnnnnnnnnnnnnnnnnnnnnnnnnnnnnnnnnnnnnnnnnnnnnnnnnnnnnnnnnnnnnnnnnnnnnnnnnnnnnnnnnnnnnnnnnnnnnnnnnnnnnnnnnnnnnnnnnnnnnnnnnnnnnnnnnnnnnnnnnnnnnnnnnnnnnnnnnnnnnnnnnnnnnnnnnnnnnnnnnnnnnnnnnnnnnnnnnnnnnnnnnnnnnnnnnnnnnnnnnnnnnnnnnnnnnnnnnnnnnnnnnnnnnnnnnnnnnnnnnnnnnnnnnnnnnnnntaacttttaattattgatcctgtcacctaatattttaaacataacaaatatatattatcctcgaacctaatatagcaaatataacaagtatatatgatcatctaacctaatgttcaaaacttcttaaatataattcctctaacctaatgtttcaaaacacatacatatttattttgctctaacctaatgtttaaaacctaaaaactaaatatactctaatcttcctctaacctaaagtttatgacctaatacctataaattaaaataataaatttatttaaattaattactaaaaacaaaattaatataaaactaaacttacttgttatcaaataaacaatgtgcaccaacacaatgccttaaagccaaaacacagccaaaatgcacagccaaaatgcctcagaagaagaaaattcgaaaattgaaaaaagggaaagaatgaaactgaaagggggggaggggaatttatagggggaccacgtggcctatttcgctgggactggtagcgaaataggtaccacgttggtgtaacggcacactaaatgagcgcctatttcgctggaggcagtagcgaaataggccaagtggcgtaactgctgcataaatgcgtgcctatttcgctggggtggctagcgaaataggacacgtgacataactcctctgccatgtcagtctggcgctttgactacatatttcgctgccctgaccagcgaaatatgtagccactgctgggacgccacatcagacgcctatttcgctactgaggccagcgaaataggccgcgtggcagtctggtaaaatatactgtaggcgtggcatatgggtaaaaaattttaaaatttgtggcattacggtcaatctctccaaaatcaaaacctagcaagtatgttggagcatagcagaggtccttgtgcttgattatgccctcgtgccatcgactttcgctgccattgtcccaccaacatgcagccaatccaccaaatctcccaattgaattaatcaaactattttttttaacatgttattattgaagtaacttttataaaaaattattgttaattttttgttggagacttggagcacatataaggtgatgaatattctctttttaacataatgtattttatatttaaggattaatcagaattcgaatcttaaattaattgattaagaaacacaattattatcacttatgttaattgttattagttgaactcagcaaccttgatgcatgcatgtgttagataaaagtttgcataacttaaatttgtgtaaaattcaagtttgcaaacttagtttgcaaaaattacttggtatgtgtttggattaaatatacaaatttaaagttttttgttttttaatgataactttattaaaaaaatacaaagaacatgattaattttaaaaaaacatattaaaaatactatttataataatttttttggtttaaatatatttttagtctctcaaattgggtctctatttttttagtccttcaaaactaaaattgtgtttttagtccctagaatttgataacacattttttagtccttttcgcataagccattaatataataatacaaccaaatagggaatatagagttagtgatttgtgatgacttttaactcacagagcttgcacaaaaaggtttaacaaaaatctaaacacaaacatgagattgggatggttttctttccataaaaaaaatctaaaaacatagatgagatgattgggatggttttctttccatagtacatgacacttcatacaactcctcattggtcagaactctctgtaggtagcctttttcaagaattcaacaattagtttactttgaggattaatcaccctctctacaaaccaatacgagacttttcaacgtgttttgtcctcactcacacacttcctgagaaactttccagaaggtcatccatctcataactactctaagtcaagcacgcttaaatgtgcatttcttaagtaagtaataggttatcaaaagtagatgcatcttattgttacaggtaatactagttaattcctttaagtctttcttaaatgtaaagtctcatatttgcacaatctctaaatccctctcattctaatgtgatttgtctgaagtgttatagccgctcttctcgctagaatcctattcacagtagcatcgtcgtggcccgtgggcccaacaaaatgacaccattttgtgacaatggtgcttgtaatgttcgcaaacatagaaagaagccctcctcactgagaaaatggagatacatgaagttgcatgtgacaacaatgataacaaaataaaacagagttgggatgtggccagcgcactgcttaaatgagattgggaatacgcactactacaatataggcaaacgacgacggttctaaaccccttacaaatgtatatatacaacgacagttttgacacaaccatcttcgttgaccacttttttttgacatgcctacaaagacggttttgacgtaaaatcgtcttcgttgctcctgtctttttttttccgtacatgcctacaaagacggttttaagtcaaaatcgtctttgtttgtttatatacaaagacaattttgacgtaaaatcgtcttcgttgctcctgtctttttttttttacatgcctacaaagacggttttgacccaaaaccgtctttgtttgtttatattcaaagaccattttgacgtaaaatcatctttgttgctcctatttttttttttcgtatatgcctacaaagacaatattaaatcaaaatcatctttgtttgtttatatacaaaggcggttttgacataaaaccgtctttatttctccaatctttttttttcgtacatgcctacaaagacggttttaagtcaaaaccgtctttgtttgtttatatacaaagacgattttgacgtacaaccgtctttgttgctcctgtctttttctttttactttttgtatatactacaaaatgaactagtgggcttaattgaatttacacgtaaaaaaatcaccacattgaagaatttttattctataaaataaataacaaaccaaattgtgagtacactaaaatttggaattccacttagcattataaaatgccctttgacacggaattatgtcaaatatcatggaacattatattaaatgtaaatgattttatataacatcattaaaacaaacatcctagtttatagcctgcaacatcctagtgagcacaccaatgaaagtaacatatatggctgatattgttgctgcagttgcttcatcatcaaccaaaccatgtggttctgttgaacttaaatatatcctcaatatatatacctacatcaacaagaaatagaaaaagaaagaaatatagtcataattgggttcttcatcatcctactaaataatatagaaaattgaaattgtttaatgtcagtgtcacactatagccaaatacaaccatttaaaaatacaaatatcatctgcctattcccatgcatgaaacaagcatctgttccgtttaatatttttagtataaaatgaagagagaaaatcacagcatatgacaaccaatattattgtatttcaaatgcattctgctataaggtgtctgctgtcaaggtcaaaccaggatagacagtcccaccaattactccaccgaggggataccttgaaatggaaaggtaacaaacattatatctagaaaatttaacaacaacctgtttaaactatgcaagtatagaggaaagatggtttcaatatgaacaccaccaacttaccaagttcgatcatctaagcagttccagaaatcatatatcgatcccattctttgtcaaaaactgtaaccaacaaagttgcgtcatcatttgtgaaatttgagttacaacttagaagtatacaattcataataatagccacaccatacacgtgaaaccagcttttgaacaacatcaatcttgtctgatttcagcccaaaagcaagtggccaaatttcagattattaatactagtgaatccaatttttaagtgacaaaagaaaggttagtttaataagatttctaatcttatcccaaaatatcttgaaaggaaaataagcaaaagaatatgaatttggattttcctaacatccctagctaattcataaaaagttacgtcataattaagtatgaaaataatcattgcatcatattcataaagaacaaacctagttgttacacaaagtacaaggctcttttacattaaaaataagtacaatgctctagaacaggggtacttttatcttctcaacatcctcaatcacaaccttcacctcattaagactcatatttcaactcaattaggaagcccacacctttcccttaaaagagcttattttagtcacacatttccattattcctttctagggagtggaatattgaatatcagccaaatctaaagttaagcttgtgagccaccaataccatgaggcatggtcttggcttttcctacaagctgctaatgacagtcattgaaagcgcccttaactatcactatgtagctacttctagaacaatctttcttagctaatcactccagccatgtggttaccttcataaataagtctaggattccctagttggcaaaaccagttaacaataagcatcccactccattagatatgaaggacccattggtgctttttcagtcattttaagaactaacccagtagttgcttggttgacaagggatttatctgtctcaggttgtgaagttacaagataatcaccactagactatgccacttcttctccttgatggtatcttgggtgatctgttgtttattgtgaccattcattgcttccttaatttcttccttgttcttcttgctttcctccacatatggctgcatgaaaagcaatcagaagtggcaaattgaaagcaaaccccatagtggcataagaaaaagaacaatgatatatttttcaaagaatagatattatgtcaacttctatatacttgtttctcaatgtaagacatattcctccatgtatcaatagccaaacgtaggattttctggccatctaaggcctgactacaagttttcaatcgagcacattcatgcttgaggaatatatgatatgcagtctttcgtcccgacgaagaacctcagcgtttcttcatttctttgacattcgagggtggcgataaaagcaccggctgttcaacataccctgcattgtgtacattattttaggatatgaaaagtgtttagccaagtcacaaacctatcatgtggcaagagtagtccttggacatctctgtgaccttttgaccatctttaatattcattttatgagataaactagctgtttaattccacttattttgaagtggacctttaaaaaaaagtggacgatgtgagaagggaaaaaaagcctttacattgaacagaacattttctaagaccaaaatgtagcaaaaacatcatatagtgaagctgctgaaatgtcttgtgttatgtcgaagcagtacatgtaaactatataagtaaaaattgtcgaggtcccatatatcaaacttatgtgtgaattgccacactgaatttatatgtacttgaaataacaacagataataggtctcttgggctaacctttggtgctgaaagatccagcttgctttgcatgatacctataaaagtacaatttctcaaactggaagagaagatgcgcataaagcttttcaacttgagaacataactttacactattcccttccaatttcatggcaaagactacttcaccctatttcttttctcgaccaacctggatatttgaagcatttaaaagaaaattcataacactaacatgatattaaaattgaatatctgagacaaattcatgcaatgatacataaaattattttagcctctcttgattatagaaccacaactgatttggatgaataaacttgcatgcacatagaagctccattacaaacaaaatacacatacaaaaacaactaaaatcatgtgaggtcaacgtggaccacagggcaatgaaatatacctagtgatatcttcctcttctagtcacctccaagtaaaacaggtacaagtctagcaaattttctcggacattgaaactgccaagcaaaattggaaaatagagcattaacagtgactccattttgcagggtgccttcatagaagctgtttgagggaaattttgaaaggcatggatgcatacgatactgaacctgtttgagataataaaacaaaaacctcttaaaccaagttgagaagagcaaggaggaagacgaccgacaccggcattcgctctcgctgcatgtgacaccggtgaagagcatcgtcaggatagagaaaaggcttgaaggagtgaccggcaggtggcaaaatttcgacagagcagctggtggagacgaagttggtcgaggtcaaggaggaagggaagctaatgcgtaaacctaacgcaactctaccctttcaaatttcctaatttatgaatgcatgatcatcaaggatggttttacgaaaattgtctttgaatacctattttcaaagtttgaaattgttcacatatttataaaattgtcactgcttcactttctaagacggttttattacaaccatctttgaatgtgcgtcattaaaaagggcttttgtagtagtgacattcctacatgcaccaaagggtgtgcaagagattcacgcctcttccctttcaacatgaagcaacgtttcttattatgtatggtgcataaaaagagaatgataaatgataattaatgtcttcaagacatttttcgtaactttttttatattctttcatgatctttaccagaaatattttttcctttggtttcttaatcattgtcttaaagacggaacattagtcagcaagacaatttgtttttgcaaaaatgtgaaaagtcaagttaaactataactgaccaaaaaaatacagcatgtaattaatgtttttataatataaattttatttagatttgttatggcttccaagcatatcatctcgtcataattagtttaaaatttactaatttatgcgggtgattcatgaaaaacaatcaacgtaacaatggatctgtacttgcattttattttatatttttttcaagatgaacaatcaacaataaattataggctaaaaacctatttcttaatacatttttaaagataattgagttatgtctttatatttaaataattattctcatttgataggaatcaacgtatatagtttctcccttgagaacaaaaacataggaatatgaaagttattttttttaaaatgttttattttcatttttattcatttattttgtaacaagcacagaaatattttgttgtccttaaaataagaaaaaaatgaatatattttctatcttaacattaagcacgcgaaagtataatacaaatatgcaagtcgttcaagtcaagcgaaaacgtagatcaaacctaattctgaaaaaaaaaaaaaaacataatgtaaaagaaacctaattcaaatacagtgtaagaaacctaattcaatagtgtacgaaacctaattttgaaaaaagtcatattaacacagtcacattcccataccataatcgtgacactcttttctctctcccccactcattctctccatatctcatatatctcataggggtgttcgcggtttggattggatcagttttgaagcaaaaaattatctgatccaattcttttggtttggtcatttgatcattcattcggtttgaaatttttttcaaatccgatccaatccaatccaatttttttcggtttggattggatcggttttcggttttttaaaaagtctaaaaataaaacttatgagacttatttttatcaaaataaagagtatctaacataaacaaacatattcattggacaaaaacaaacatcattttctaattttcattagacaaacacattcattggacaaaataaggaacaatgtattggatttttggtttttgggctatgatggggaatagacccaaatagataaagggtaaggtatggtttacaattggataggtttggattggatttgttttcaccggccaatccgaaaaccgatccaatctggtgaaaattttcgattttttttcggttttcgatttttcggttttcggttatttcggttttcggtttttcggttcggtcatcgcagtttgcatcagtttggatcggttgatgaacactcctaatatctcaccccaatctttttatactaagtggaatagacatagtgaagtgtaatttgtaggtgacgtccaaacgttggaaaacaaaacaaagacatagggaagtatacacatactagggtggtccagttctttctctaactgttggacttttgcttcatgtttcttctttctctaatggtccagcctctacaatgttttgattcattttggatttgttgcttcattttaacctcacgaccctcttccatcttcattacatatataacacttatgtaattctttcctttttgttgaagaataagtactgtcatatttcttaggtttatcatggttttgtgctatgtttgattacaaagaaaatagaaggaaaattaaataaaggtgagaaatgaacggaaagaaaatattttctttagtttggttggcacataaacagggaaggagagaaacttttaacaggtgccgtgcaaaaaatgtttttctttccaactggaaaagaaaaggagggagcatgtgaattatttgaaaagacagaaatattattgagttttagaatattcttaattttattttattttaggtgataatatatatatatatatatatatttttttttttaatttatgttgtatcttgactagtttttttatcctgcattagaaagcatattttatgttttttattttatttttattacatttcattttcgtttaagggtattatattttatagatagatgtgcaaatttattttcactcatttatgatgatcaatcaaaccaagagaaagcttatactttttttctttattattttcttattagacaactataaaaataataccactttttctttttattctttcattctatttttttctcacttttcttatgagccaaatatattgttaattagtatatagtatatgagaactgagtgaatttaactcagttagttgaacatgatatgatatacatcaattattataaatcttttgatatatattttttatttctattaataaaaaaaatgtagtatatgaggactccaacatacagagtagtaaatgaagatgaaaagaaaataaacgtactgaaaggggcttccggatgtacagcctcacaatattgaatgctccatttgattgtttaagaatggagaagcttactatattactattgcacgagttgttgtatcgttgttgaaaattttattaggaacgttattttaatgactattttttgggtaattatgttaatatttcaatatatttaagtttgtttggtcttatttataattaaattttgaataaattaaaatagctttaaaatagtttaattgttcgattttttaatctaattttagtttattttattataaaaataaaggaagaaagaagagaattggtgttgggatccaattcaagactcttttaaaggaaattttttaaactaaaggggtcagacttgtcaggctcaacaacacacttcaggttgagcgaattgctttctcttcatggtatttggattcaatgcgcacattaggtttatcctgtaatcacttaaactaatgcaacttttgtaagtaagctgagcgagcaagtgtgcgttaagcacacaactcaattacatagaaactacaatataacgcatttgatcctatttaagcaccaaggatatgaatagaatgcaaatttggttggggaactatctaggttttaggttgcatttgggaagctatcccttatcttccatgactttcctatcatttctcatcctctttttcatctatttcttctttttttcttgtagccatatcattaggtttatccattttggggattgatgcagttaaacccatttttttttttgtagaaattgtagttattaatctatgtttatttttcattattaagtatacttttctatgcattaatgcttgtttgacttgatcaccatttgcttgatttgaattgtcattgggaaatatttttaaacttagaaatgaagaggaacacctaatggattttgtgtctaaggatagagcaatacttgttattcattttttaactcttgttcttaaagcaaatcacttggtcaagggattgataatttggttaagagacttagattctttccatttaagggatcgaattaagcttgattatttttgtgaattgatgataataattggactttaaactataggagtaacttttgtttgcatgaggatgtgattaagtaaaatcaatccaaactcttttgttcattgttattttaccaattttcaccgcattccatatgttcatataaatgccaaaaatagttttttgtttattcacgttcttcctatttacatttttgtatttcagtctaattataattgttgtttccaaaagtcataattagtaaacattgttattttattgagtattacacaagtttatgtagttgtgatatttgaatttctattttatactatttgtatgacttaatatgcttacctaactaatttaattgaatatgatgtgcatcaattattataaatattttagtatatattttttattcttataaataaaaaatatagtatatgagaaccccaacagacagaacagtaaatgaagatggaaagaaaataaagatattgaaagggacttgcggatgtacaaccccacagtatttaatgctcgatttgattgtttaagaatggagaagcttaatatattaactattgcacaagctgttgtaccgttgtacatttagaactggatgtgtgtttgttttgactaatcaatgtgtatatctgttgtagtgcttaatgttataagcgatcaaccaacgaatgttctagaattaacaaagacacaagtgtttactgttatcgggctgggaaagagcttgaggaaaagttataaatgttaaatgaggggaaaatatattccattttcttttctacactgatatgtagggatggcaaatggacttggtccgcaaaaaatatggaatgggttgactcggtctatttttgtaaagtgtgttagaaatactagtccgtcctcctttaatgcgggccagtgggctagtgggtcagtccgcctaaaaaattaaaaaaactaaaaaagttaatttttttaaaaaaatgcaaaaaattatataaaaaatacaaatatgataattaaaaaaacacaaagttaaataaaagtaaataatttaaaattaatattaaataaatgatgtcatgtgataattcacaaaattacaccatttgcaaatgaaatttatggatataaactgtctaaagtgtaatatactagtaatgaaagattatttgaaagtatcattatcataaatattttaataaatattttaatattaaaacttaaaagttaattatgagagtgcaaaagaatataaattaaaagaatatacctatttcaaaatatgttaaatatatctatttaattttaatatttaatattttaaataatattagctcagcgggctgacctgtctcgcttttgattagcggactgatattatcaacccaacctgtatttttttgccggctaagcgggctggcccgatggaccagacccattttgccaaccctattgatatgtattgagctgaagtattcgactatctgaatagttattcgggcaatcaataaggttaatgtcccatcaactcatacaacaaagtaacaaaaagacatagttaaataggatgaaaaactggattacctaaataggtaatcatattcaaagacttataaggtttaacgctcataaaagtattataaataaatactaaattttaagacaggttattattcattcacatttattactttaggatgaaattttaattaagtcttagagtgtctcttatggattttttcctcccatccagaagacaacaaaggctcatcagaagtgttataagaagaatggtaccttgtctattcaagnnnnnnnnnnnnnnnnnnnnnnnnnnnnnnnnnnnnnnnnnnnnnnnnnnnnnnnnnnnnnnnnnnnnnnnnnnnnnnnnnnnnnnnnnnnnnnnnnnnnnnnnnnnnnnnnnnnnnnnnnnnnnnnnnnnnnnnnnnnnnnnnnnnnnnnnnnncaatcaaacaaaattcattgtaaatatgatatttttaacaattattgcaaaaaaaaaattatcatatttaataatctacaatgggacgacaatgtaaaaattttcactttcaatgcaagtattatttattctcttataaatatatcattaatttgttaaacctatttttaccactcacccatctgcgcgtttaaatattaaatagttaaaaattatttattataaatataaattaaaaattcacaatattaagctaaatattatcactgaaaaacttaaacaaaaacaaataaattataattctaacattctcttcgaaatttatcttttgttcattattttccatttctattagtttatcagttattcttttcagttcattactttgtagaaattacatgtaatagttcaaaatgcagcagtcttttacaatcagctgccaagatctttatcatcagctaagtatctgttttttttattatatttatatatatacaagagctaaatatttgtttcaatctgtgttattgttaattataatacactcacatgcatacttatgggggaaaaactttacagtagcaaaacataaaattaaagacattacgaagctcctattctattattctgccaaaaattcaaggaagctgatgcatgtgcaggtcatgtagccatttcggggcatcatgagcgtgacatttctaattattggtctcttgttttttattctactcaccaactcgttattgctcttcttagatgacattcctaggtttttaggatatttgtttgtgcaaaaccaatacaactttacagctaacatgcttctagctcaacaatttctatagaagtctgttgtttattccgttccaatgctggcccaaatccctaggtgtcaagggaaagttattgggcccaaatcccaaggtgttgaccttggcccattaccatttagggtaaattcctaaatgtggcatctctctataaataccctcattatagatagagacaaggactgacgaaggaatttcagagactgacgcaaggctgcggcagtgtgaggctgagcgaaacagagagtgggtgagtctccggcattgttggccgtttgagagtgtctccgagagctgagagcatcttgttgagagtgtttccacttctgtgtaggcgaggctgagtggctccggctcgaggctgttgagcatttgtaaccattattattgaatagtggattgtttctggacttggtcccgtgggttttcctttcagaggttttctcccacgtaaagctatattgtgtgttgattctctccctatctactctcacttgttgttgatcctgtgtttccgctgcatttactgtatttatctgtgttttgagttgttctgggttgaggtgttgctccccagcgttacggttggtagagaagagctcccagccaatcaggaagacgtggtgccgagcttgaggaggaggcggtgtattcgtgcacgtgcagtgtcgaatagccgagctcgcgagtagctcgggtcggaagttccacgtcggttgtggtgccgaggtcggtttcgcgacgtcgggtagcaaattccacaacaaaagtggtatcagagctccaggttggaagctctgagagagagataagggatggagaccagtggcggtgtttcccatgatggggatatgttcaagttgaccgcagacaacttcgcctactggaggccgatgatggaagatcatctgtattgcaaggatttgcatgagcccattgtccttgatgagaggccggctggaaagacggacaaggaatgggagatcctgagtcggaaggcagtggctacgatcaggaagcatattgataaaagcctctttgagcatgtgtcccagttcacaaatgcatatgagttgtggaacaagttagagtccatgattcagaagaagactccgaggaacaaggctcacctggttcgccggcttgtgaagctggagtataaggacgggatgagtatgattgagcacctcaacacgtacaaaggtatcgtgaaccagttgtccaaggcnnnnnnnnnnaagggaaactggagatggatgtcgtgaccgacagcctcctgaacgaggaaaccaggaggagagaacggggtgcgagcagcagtggagatgccattgttgtggagcggagtaaatccgaccatcgggctcgaggtcggagccgaggtcgtgagagacgggataagtcccaggatcggtcgaggccgaggagtgaactgaagtgcttctactgtgggaagcccggacacagaaaggcggactgctggactctgaagagagacgagcagagcgggtcggtgaaatccgaccagaagaaagaggtgaagagcaccactgcggtggtagctagtgtagggcccgaggtgtttctgctcggcgaggacattgtgaatgtcgcccttgatgattgtacctggatagtggattcaggtgcttctttccacgtgacccctcacagaaggtttttctcctcctaccggagtggagagttcggagctgtgaagatgggtaatcaggtgaccagcacaattgtgggtgttggtgaggtgacattgacctcggaggtcggatgtcggatagtcctaaaggacgtgaggcatgtgcctgacatgcgattaaatctaatctcggtcggtaaactggatgacgccggattggtgaacagctttgagagctgcagatggaagctaaccaagggaagcttggtgatagctcgtggaaagaaggaaggctccttgtatgtgatgcagggaagcatggctggtggagaagccaataccgtgctcaacgggtcaagcctggaactgtggcataagcgtcttggccacatgagtgagaaggggcttgatattctgagcaggaaagagcttttgaccgggttgaagggacaagtgctggagagttgctcgcactgtctagctggaaagcagcaccgggtatcttttgtgaggccggatcaaccgaggagacgaaggtatgtgttagacctcgtccatactgatgtttgctccatgtcggagagatcgcttggaggagcacagtattttgtctctttcattgatgaccactcccgcaaagtgtgggcgtatcctttgaagactaaggatcaagtcctccagtcgtttaaagaatttcatgccatggtggaaagggagactggaaggaagttgaaagtggtcagatcggataacggtggagagtaccggggtccctttgaagcctactgtagaaaggccgggatcaggttggagaagacgcctcccaagacacctcagctgaacggactcgctgagaggatgaaccggactattgaggagaaggttcggagtatgctgtccaacgcagggttgtcgaaggcatactggggagaagccgtgaggacggctgttgatttgataaacctctcaccgtcgaggcctttggaaggggagattccagaggagatttggactggtcggaaagcgacctatgatcacctgagggtgttcggatgccgagccttcgtgcacgtccctaaagatgagagagggaagttggatgcaaagacgaaggagtgcatatatcttggttcgccgagaactgagttcggtttcagactttgggatccaatcgggaagaagattgtgaggagccgagatgtagtcttccatgaggatgagaccatccatgacatctcgaagcctgaagtccgggttactgtccgaggagaagaacccgtccctcaagtgcatgctgaagcagggggagaaaccgaggacgtcgctgaagacgacgtggatgaagatgatgcccagcaaagtgatgccggggtccgagcagaagaagagccgggctccgaaggtgaagaagaagagccgaggtaccccactagagagagaagaccttcttcgaggtatccacctgacgagtataccatcattgccgaggagggagaacctcagagttttgatgaggcggtggagagctcagaccgagcagagtgggagaaggccatgcaggacgagatnnnnnnnnnnnnnnnnnnnnnnnnnnnnnnnnnnnnnnnnnnnnnnnnnnnnnnnnnnnnnnnnnnnnnnnnnnnnnnnnnnnnnnnnnnnnnnnnnnnnnnnnnnnnnnnnnnnnnnnnnnnnnnnnnnnnnnnnnnnnnnnnnnnnnnnnnnnnnnnnnnnnnnnnnnnnnnnnnnnnnnnnnnnnnnnnnnnnnnnnnnnnnnnnnnnnnnnnnnnnnnnnnnnnnnnnnnnnnnnnnnnnnnnnnnnnnnnnnnnnnnnnnnnnnnnnnnnnnnnnnnnnnnnnnnnnnnnnnnnnnnnnnnnnnnnnnnnnnnnnnnnnnnnnnnnnnnnnnnnnnnnnnnnnnnnnnnnnnnnnnnnnnnnnnnnnnnnnnnnnnnnnnnnnnnnnnnnnnnnnnnnnnnnnnnnnnnnnnnnnnnnnnnnnnnnnnnnnnnnnnnnnnnnnnnnnnnnnnnnnnnnnnnnnnnnnnnnnnnnnnnnnnnnnnnnnnnnnnnnnnnnnnnnnnnnnnnnnnnnnnnnnnnnnnnnnnnnnnnnnnnnnnnnnnnnnnnnnnnnnnnnnnnnnnnnnnnnctggaggagcgattgcgtggcaatcaagattgcagaagtgtgtggcactttcgacgacggaggccgagtacattgcagccactgaggcgtgcaaggagttcctgtggatgaagagttttctccaggaggtcggccatgagcaagacgagtatgtcttgaagtgtgacagccagagcgcaatacatcttgcgcggaactcgacatatcactcccgcagtaagcatattgatgttcggtatcattggatccgagatgcggtggaggtcggaaagctcacacttggaaaagtgcacacgagtcagaattggtctgacatgatgacgaagccggtaccagcaataaagcttgaagattgctgtgtgggagccgggctcgtgagctcgacttgaggtcgggcagtcctactcggaaggagtccgagtagaagtcctcggcaggaggccgagtagagtaggtcggtaagagaccgacctggtgaggtcggtagaagttcgaccaggggagctcggaagaagtccgagcagtcgagatcggcaggcgaggtcggcaggaggtcgaccagaggaggtcggatcggctagttttggaaggccggttttttgtccggatagccgtttgtcgcattgcaacggaagggggagatttgttgtttattccgttccaatgctggcccaaatccctaggtgtcaagggaaagttattgggcccaaatcccaaggtgttgaccttggcccattaccatttagggtaaatccctaaatgtggcgtctctctataaataccctcattatagatagagacaaggactgacgaaggaatttcagagactgacgcaaggctgcggcagtgtgaggctgagcgaaacagagagtgagtgagtctccggcattgttggccgtttgagagtgtctccgagagctgagagcatcttgttgagagtgtttccacttctgtgtaggcgaggctgagtggctccggctcgaggctgttgagcatttgtaaccattattattgaatagtggattgtttctggacttggtcccgtgggttttcctttcagaggttttctcccacgtaaagctatattgtgtgttgattctctccctatctactctcacttgttgttgatcctgtgtttccgctgcatttactgtgtttatctgtgttttgagttgttctgggttgaggtgttgctccccagcgttacggttggtagagaagagctcccagccaatcaggaagacgtggtgccgagcttgaggaggaggtggtgtattcgtgcacgtgcagtgtcgaatagccgagctcgcgagtagctcgggtcggaagttccacgtcggttgtggtgccgaggtcggtttcgcgacgtcgggtagcaaattccacaacaaagtcaaacaaaaataaaaattatttagatacccaacttctgcttggggattcttcatattctgcaaatatagagattgaagagatctctcttaattaattatctctataaagtaaatgtaaccttaattgtatgtatagaacttaattaagttgtcccttagataacgagatagtcagaaaataatttatgcaattattaataaatccttaatagttaagcctataataataaaaccttatgaagctgaataatttttttcccccacatgtctcctccttcggagcaatttaatataagaaaatgatagtttcatgatatcttcctccaaaatccctagttttttaaggaaaaaaataaataaatactcaatgctgtatgacacgtagagaagataagagagaaaattataaatataatagttgatatgatatgataaaaaagaaatagaaataaattaagagtgttgactaggtgtttaatatttaagaattaagggtggctaaatatcattgtcctttttttttcaataactgtattagagtctttttgatggaataaagtatctccacaaatttcactgagtttgaatccataatgagactaattttttggtgaaagatttcatcacacttaagcctattaccggatatgtgttctgtggaattcgaaaccgattttaaagctaggcaactggaagtttttgtattaaaattcggacatgcacgaaattaacaaatgtttaagagccatattcttaattcaaacggagtaattatgtaatgcaagtcaaaagaaaatagtggtgcataattgttgaggtttaattctagtggaaaacaaaaagaaatagttatgaaggcgatacgggtatcacatgactattgattgcaattataaataacgtgattgtcctaaatcatcatctatttagttctagtggaaaacaaaaagaaataactaaaatggattaatcatcaatttaattctagtggaaaacaaaaagaaataactataatggatgataatggagtcagatgattattgattgcaatcgtgatcatgaaatatctaataattttgtgtgtgagagaggttttctatttaaattaagttgtacaaaaactgatgatcaatctgactttgtttccaaaccttgaatgctcgttgtctgtcacttgttgcatcttgctagtacacccacgagcaaaccccgacttcttgaatagaaggtctgctctagcttgtcgtacttgtgtccagaaaaggtgcagggacagagtagagcagaagaaataatgatgttagacagaaaaccaattaaaacaaaaattgatggatgagagacgtgtgtcctaattaattataggattcttggatctaaattttttttaaagtattttaaaaaaataagaagaaaataaaataaatttttttataaattaaaataaattttttattagtttatttataaatattatttatttttaaaagaaattatattaataaatttttaaaaattaattaatgaaaaatttatttttacttataaataattatcttattttttttctcattttcttcttttaaaattacttctaaagaatcttacctatacatattcatattgtctttggattagttatcttacataagtccaaaatcatcttaaaataaaaggtaatgtgattttatattaatatttatgtgtgcatgaatgtttggaacgaattaaatcatgcagatcaataccctcttaccatatatggtccaaatggccaaaatgaacggataagtgacatatatagaatatagtgcgtgtttagatgaaagtatgttgattttattaactttgaacgaaatttattttagttagaattaattttgaaattatgctagctatttacgtttagatgattttattgtacaacgtaacacctctatctggtgccctttgactgtatgtgaaaattacaaagaataagttatccgtctttgacgttagggatggaaataagtaagatcaggtcagatttggttaggcatgatcttgatcttatttaaaaacatcaaatttggtctagtctatttatctattatagacttttattttttaaggcttatcctatttaaaaatttgacttgacttacgagcctattaaaaaatctactttacaataaatattatattagtgaaacttcgagaattcgcataatactttttttaatttaatataaagaactaaacatattgacatacttcccttttaatttatgcgtgaaaaaaaattaaaattaattagaacactctaacatgagattaaaattcactaatcaaaacaaactcaattaaagattgatttatatttttttaattttaatatatatatatatatatatgcttttttacaaacctactacaaagatttcaaattttctattttatattttatcttttaagtaagataggctatttaaattttatcttattttatttcttttttaaaaagattgatttatatctttttaattttaatattaatatatatatatatatatatatatatatatatatatatatatatatatatatatatannnnnngctagcctgacatgcctaacagactttttgtaaaacttgaacctagcttttttatttaaatggacttttcaaaaagtctaaatctggcctttataataaacaagttaggccaagtcagaccttaaacaggctgagttaaagatccctgatagatagcctgacctatttccattcctatttaacgtgaaaatttgattatatgtgaatctcaaatgcacactcaaacacgtgctaagaaaagaaagttatggaaaagttatctaaaattgttttagacataaaattaatttaataatgtaaaattaaatatataaaaatttatctaatatcacattagctgacattttaatataattttgtagaatgtaaggtgaaactaaaaacacatttattgttgcttttcacaaacgtggattgattacttgaatttgatatacaaccaaacatgtacatatttaatttttttaaggagaaattgattttaagttaaaatgactttaatagactttttggtttcggtcttgaaaataattttctacattctagatgtgattttcaaagcacgtatttggaaacgctttcacaacacacttatcaatgttgtttcacgtccaaattatgtggccgattaaaaagctaattatatttacatcaagtggacgcatgtcactctcgtctaacatctaagcaaacacacagaaaaactaataattataatatagcctccacatccctaacgtgattcctctatctcaacaatgcaataacaaaatccgaaaatctttgtcctccatatacctaagctgattcctccatttcaacaagtttccaaacacactagaattaaatttagctttggataaattttttttcctaagcgatgtcaccaattttcttttagaatgaaaatatttaaatataaattatgtcactttaaaattaatcaattacattcaaattttattttataacttgaaataaataatagaatagtttaaaggcgttttttaatttttttaatttaaaaatatttcttttttaaaaaaaaaatatatatatatatatatatatatattaaaattaattattatttttataatggggatatgaaaaaaagaactacagcgccagaatatatcaaaattacgtttagcaagcgtttttttttacaaaaaataaaataataagaaacaaacatgtggcgattacaacaagtcaaaggtttgggattatgcttgcctaacaccaagtaaaaatgaaaaaaaaaaaaaaaaaaannnnnnnnnnnnnnnnnnnnnnnnnnnnnnnnnnnnnnnnnnnnnnnnnnnnnnnnnnnnnnnnnnnnnnnnnnnnnnnnnnnnnnnnnnnnnnnnnnnnnnnnnnnnnnnnnnnnnnnnnnnnnnnnnnnnnnnnnnnnnnnnnnnnnnnnnnnnnnnnnnnnnnnnnnnnnnnnnnnnnnnnnnnnnnnnnnnnnnnnnnnnnnnnnnnnnnnnnnnnnnnnnnnnnnnnnnnnnnnnnnnnnnnnnnnnnnnnnnnnnnnnnnnnnnnnnnnnnnnnnnnnnnnnnnnnnnnnnnnnnnnnnnnnnnnnnnnnnnnnnnnnnnnnnnnnnnnnnnnnnnnnnnnnnnnnnnnnnnnnnnnnnnnnnnnnnnnnnnnnnnnnnnnnnnnnnnnnnnnnnnnnnnnnnnnnnnnnnnnnnnnnnnnnnnnnnnnnnnnnnnnnnnnnnnnnnnnnnnnnnnnnnnnnnnnnnnnnnnnnnnnnnnnnnnnnnnnnnnnnnnnnnnnnnnnnnnnnnnnnnnnnnnnnnnnnnnnnnnnnnnnnnnnnnnnnnnnnnnnnnnnnnnnnnnnnnnnnnnnnnnnnnnnnnnnnnnnnnnnnnnnnnnnnnnnnnnnnnnnnnnnnnnnnnnnnnnnnnnnnnnnnnnnnnnnnnnnnnnnnnnnnnnnnnnnnnnnnnnnnnnnnnnnnnnnnnnnnnnnnnnnnnnnnnnnnnnnnnnnnnnnnnnnnnnnnnnnnnnnnnnnnnnnnnnnnnnnnnnnnnnnnnnnnnnnnnnnnnnnnnnnnnnnnnnnnnnnnnnnnnnnnnnnnnnnnnnnnnnnnnnnnnnnnnnnnnnnnnnnnnnnnnnnnnnnnnnnnnnnnnnnnnnnnnnnnnnnnnnnnnnnnnnnnnnnnnnnnnnnnnnnnnnnnnnnnnnnnnnnnnnnnnnnnnnnnnnnnnnnnnnnnnnnnnnnnnnnnnnnnnnnnnnnnnnnnnnnnnnnnnnnnnnnnnnnnnnnnnnnnnnnnnnnnnnnnnnnnnnnnnnnnnnnnnnnnnnnnnnnnnnnnnnnnnnnnnnnnnnnnnnnnnnnnnnnnnnnnnnnnnnnnnnnnnnnnnnnnnnnnnnnnnnnnnnnnnnnnnnnnnnnnnnnnnnnnnnnnnnnnnnnnnnnnnnnnnnnnnnnnnnnnnnnnnnnnnnnnnnnnnnnnnnnnnnnnnnnnnnnnnnnnnnnnnnnnnnnnnnnnnnnnnnnnnnnnnnnnnnnnnnnnnnnnnnnnnnnnnnnnnnnnnnnnnnnnnnnnnnnnnnnnnnnnnnnnnnnnnnnnnnnnnnnnnnnnnnnnnnnnnnnnnnnnnnnnnnnnnnnnnnnnnnnnnnnnnnnnnnnnnnnnnnnnnnnnnnnnnnnnnnnnnnnnnnnnnnnnnnnnnnnnnnnnnnnnnnnnnnnnnnnnnnnnnnnnnnnnnnnnnnnnnnnnnnnnnnnnnnnnnnnnnnnnnnnnnnnnnnnnnnnnnnnnnnnnnnnnnnnnnnnnnnnnnnnnnnnnnnnnnnnnnnnnnnnnnnnnnnnnnnnnnnnnnnnnnnnnnnnnnnnnnnnnnnnnnnnnnnnnnnnnnnnnnnnnnnnnnnnnnnnnnnnnnnnnnnnnnnnnnnnnnnnnnnnnnnnnnnnnnnnnnnnnnnnnnnnnnnnnnnnnnnnnnnnnnnnnnnnnnnnnnnnnnnnnnnnnnnnnnnnnnnnnnnnnnnnnnnnnnnnnnnnnnnnnnnnnnnnnnnnnnnnnnnnnnnnnnnnnnnnnnnnnnnnnnnnnnnnnnnnnnnnnnnnnnnnnnnnnnnnnnnnnnnnnnnnnnnnnnnnnnnnnnnnnnnnnnnnnnnnnnnnnnnnnnnnnnnnnnnnnnnnnnnnnnnnnnnnnnnnnnnnnnnnnnnnnnnnnnnnnnnnnnnnnnnnnnnnnnnnnnnnnnnnnnnnnnnnnnnnnnnnnnnnnnnnnnnnnnnnnnnnnnnnnnnnnnnnnnnnnnnnnnnnnnnnnnnnnnnnnnnnnnnnnnnnnnnnnnnnnnnnnnnnnnnnnnnnnnnnnnnnnnnnnnnnnnnnnnnnnnnnnnnnnnnnnnnnnnnnnnnnnnnnnnnnnnnnnnnnnnnnnnnnnnnnnnnnnnnnnnnnnnnnnnnnnnnnnnnnnnnnnnnnnnnnnnnnnnnnnnnnnnnnnnnnnnnnnnnnnnnnnnnnnnnnnnnnnnnnnnnnnnnnnnnnnnnnnnnnnnnnnnnnnnnnnnnnnnnnnnnnnnnnnnnnnnnnnnnnnnnnnnnnnnnnnnnnnnnnnnnnnnnnnnnnnnnnnnnnnnnnnnnnnnnnnnnnnnnnnnnnnnnnnnnnnnnnnnnnnnnnnnnnnnnnnnnnnnnnnnnnnnnnnnnnnnnnnnnnnnnnnnnnnnnnnnnnnnnnnnnnnnnnnnnnnnnnnnnnnnnnnnnnnnnnnnnnnnnnnnnnnnnnnnnnnnnnnnnnnnnnnnnnnnnnnnnnnnnnnnnnnnnnnnnnnnnnnnnnnnnnnnnnnnnnnnnnnnnnnnnnnnnnnnnnnnnnnnnnnnnnnnnnnnnnnnnnnnnnnnnnnnnnnnnnnnnnnnnnnnnnnnnnnnnnnnnnnnnnnnnnnnnnnnnnnnnnnnnnnnnnnnnnnnnnnnnnnnnnnnnnnnnnnnnnnnnnnnnnnnnnnnnnnnnnnnnnnnnnnnnnnnnnnnnnnnnnnnnnnnnnnnnnnnnnnnnnnnnnnnnnnnnnnnnnnnnnnnnnnnnnnnnnnnnnnnnnnnnnnnnnnnnnnnnnnnnnnnnnnnnnnnnnnnnnnnnnnnnnnnnnnnnnnnnnnnnnnnnnnnnnnnnnnnnnnnnnnnnnnnnnnnnnnnnnnnnnnnnnnnnnnnnnnnnnnnnnnnnnnnnnnnnnnnnnnnnnnnnnnnnnnnnnnnnnnnnnnnnnnnnnnnnnnnnnnnnnnnnnnnnnnnnnnnnnnnnnnnnnnnnnnnnnnnnnnnnnnnnnnnnnnnnnnnnnnnnnnnnnnnnnnnnnnnnnnnnnnnnnnnnnnnnnnnnnnnnnnnnnnnnnnnnnnnnnnnnnnnnnnnnnnnnnnnnnnnnnnnnnnnnnnnnnnnnnnnnnnnnnnnnnnnnnnnnnnnnnnnnnnnnnnnnnnnnnnnnnnnnnnnnnnnnnnnnnnnnnnnnnnnnnnnnnnnnnnnnnnnnnnnnnnnnnnnnnnnnnnnnnnnnnnnnnnnnnnnnnnnnnnnnnnnnnnnnnnnnnnnnnnnnnnnnnnnnnnnnnnnnnnnnnnnnnnnnnnnnnnnnnnnnnnnnnnnnnnnnnnnnnnnnnnnnnnnnnnnnnnnnnnnnnnnnnnnnnnnnnnnnnnnnnnnnnnnnnnnnnnnnnnnnnnnnnnnnnnnnnnnnnnnnnnnnnnnnnnnnnnnnnnnnnnnnnnnnnnnnnnnnnnnnnnnnnnnnnnnnnnnnnnnnnnnnnnnnnnnnnnnnnnnnnnnnnnnnnnnnnnnnnnnnnnnnnnnnnnnnnnnnnnnnnnnnnnnnnnnnnnnnnnnnnnnnnnnnnnnnnnnnnnnnnnnnnnnnnnnnnnnnnnnnnnnnnnnnnnnnnnnnnnnnnnnnnnnnnnnnnnnnnnnnnnnnnnnnnnnnnnnnnnnnnnnnnnnnnnnnnnnnnnnnnnnnnnnnnnnnnnnnnnnnnnnnnnnnnnnnnnnnnnnnnnnnnnnnnnnnnnnnnnnnnnnnnnnnnnnnnnnnnnnnnnnnnnnnnnnnnnnnnnnnnnnnnnnnnnnnnnnnnnnnnnnnnnnnnnnnnnnnnnnnnnnnnnnnnnnnnnnnnnnnnnnnnnnnnnnnnnnnnnnnnnnnnnnnnnnnnnnnnnnnnnnnnnnnnnnnnnnnnnnnnnnnnnnnnnnnnnnnnnnnnnnnnnnnnnnnnnnnnnnnnnnnnnnnnnnnnnnnnnnnnnnnnnnnnnnnnnnnnnnnnnnnnnnnnnnnnnnnnnnnnnnnnnnnnnnnnnnnnnnnnnnnnnnnnnnnnnnnnnnnnnnnnnnnnnnnnnnnnnnnnnnnnnnnnnnnnnnnnnnnnnnnnnnnnnnnnnnnnnnnnnnnnnnnnnnnnnnnnnnnnnnnnnnnnnnnnnnnnnnnnnnnnnnnnnnnnnnnnnnnnnnnnnnnnnnnnnnnnnnnnnnnnnnnnnnnnnnnnnnnnnnnnnnnnnnnnnnnnnnnnnnnnnnnnnnnnnnnnnnnnnnnnnnnnnnnnnnnnnnnnnnnnnnnnnnnnnnnnnnnnnnnnnnnnnnnnnnnnnnnnnnnnnnnnnnnnnnnnnnnnnnnnnnnnnnnnnnnnnnnnnnnnnnnnnnnnnnnnnnnnnnnnnnnnnnnnnnnnnnnnnnnnnnnnnnnnnnnnnnnnnnnnnnnnnnnnnnnnnnnnnnnnnnnnnnnnnnnnnnnnnnnnnnnnnnnnnnnnnnnnnnnnnnnnnnnnnnnnnnnnnnnnnnnnnnnnnnnnnnnnnnnnnnnnnnnnnnnnnnnnnnnnnnnnnnnnnnnnnnnnnnnnnnnnnnnnnnnnnnnnnnnnnnnnnnnnnnnnnnnnnnnnnnnnnnnnnnnnnnnnnnnnnnnnnnnnnnnnnnnnnnnnnnnnnnnnnnnnnnnnnnnnnnnnnnnnnnnnnnnnnnnnnnnnnnnnnnnnnnnnnnnnnnnnnnnnnnnnnnnnnnnnnnnnnnnnnnnnnnnnnnnnnnnnnnnnnnnnnnnnnnnnnnnnnnnnnnnnnnnnnnnnnnnnnnnnnnnnnnnnnnnnnnnnnnnnnnnnnnnnnnnnnnnnnnnnnnnnnnnnnnnnnnnnnnnnnnnnnnnnnnnnnnnnnnnnnnnnnnnnnnnnnnnnnnnnnnnnnnnnnnnnnnnnnnnnnnnnnnnnnnnnnnnnnnnnnnnnnnnnnnnnnnnnnnnnnnnnnnnnnnnnnnnnnnnnnnnnnnnnnnnnnnnnnnnnnnnnnnnnnnnnnnnnnnnnnnnnnnnnnnnnnnnnnnnnnnnnnnnnnnnnnnnnnnnnnnnnnnnnnnnnnnnnnnnnnnnnnnnnnnnnnnnnnnnnnnnnnnnnnnnnnnnnnnnnnnnnnnnnnnnnnnnnnnnnnnnnnnnnnnnnnnnnnnnnnnnnnnnnnnnnnnnnnnnnnnnnnnnnnnnnnnnnnnnnnnnnnnnnnnnnnnnncgaaagcgcaccttatcggtaaatatttttttaaaaaacacccttttggttcttttgcccaatactaaactagcaaatttaatactacgtggtatttagatagggacgtaggaatgccgatagaaaagggtggggactggggaaatataattaaattgagaaaatattaggaagaacatgacagaaaattattatccttggcgaacaaatactaattcggtttcaattgtgcaaaatatacactaaagaatacagttataatacgacatgcatgcacacagaaatataaaaaaataattaaaaggtacagattatgatacaattataatatagtatatatcaaactaatataaaattaacatataattaatactaatattatatcaaaagagaaaagtagtggatctttttttctgagtcagaaatttaacgaataagtgtgcattattataagattaaatcgtgattttggtctccttaatttttttaattcttgattttgatcttcctatattttaattgtaacatttaatcctctaatcttataaattgaggattttggtgctcctaatagattattaacaaataattataattaattgagttattaaattaattataaattaatcaaaattattaattattaaaaaattgaacaaaaattattaatcctaattttataaaatattatggtccttcccttatctgcaagcaccttttctaccttcactttcccacatgactccacctacaataacatcacaataaaattaatagtcttttattaaaaaaaataatgattaataattttttatttaattataattaatttaatatctaataattacaattattagtcaataacttatcagaaggactataatcacaaattaataaaactaaggagactaaaattataattcagccatgttataaacataataagatattattacagttaatttaattattgtaatatttctatttatattgatatgaaggcttaaagataaaaaaaataaattccacttaatatttttcaaaacgtccacaagacataaattcgtatcaaacatatataccacgtacatataccacgtgatatacatggttgctgtttagaaatattcattaattgattcctcatagacaccaaacaccttgaactgatgtgcgacaatatatacacgtcgctgtctattttcaaaactggcataaaactgttgaatatacataagtctattgttgttaaattcaagttttttttaatgtctatatataaaaaagaagttatttttaattttttaacttaaataaatgcaatttcaattagttttaaaccagtatcttacaattattattctcaatctttaaatttcaagaatagcttaacatagttacttttttggtaggttcattgcagctcattgtacttttgaatggaagttggtttatgccgattaagtggcgnnnnnnnnnnnnnnnnnnnnnnnnnnnnnnnnnnnnnnnnnnnnnnnnnnnnnnnnnnnnnnnnnnnnnnnnnnnnnctttatatatatatatatatatatatatatatatatatatatatatatattacaatcgtattatctctaccattttgatccccactcaactcaattggatgctcaatgtggtgttgaatatcattggttctaaaataaataaaaagtaaaaaaagtagacattttataacttttctgcctgcttgttctagcattattgaactcttatattgacaaaggtaatgagtggcaaccactattttaaaaatcacgacctcttattgttgaagtatataaaggttttgatgaaataattcaaaggatatacttatctcttcttagaaacttgtgcaagacttctaaattcaactatgattggcttactagaaaaatttgtgaaatctaaaactaaatcaaatattttctttaataaaaatgattttcaaatgttgtaacaataaacaccattttgaaaatcaaaggttcaaaagattagctcatgaaaataatttgaaaacataaaatcaaaataaagtttttccaaatcaagattttttaaaaataatcttaagcagttaaacattgataaatctatttataaaatgtaaaattaaggttgattaagttctctttgataatatttatggaaaactattttggggtaatatagaatgtaacaatcaattgtcaactccactaattgattattccacaaaataatcaattacagttgcttttgttgtaattgattgcccacgttcagggataaattcatttattaacgattacttctttagataatcaattattaattattaataaggcacttacaaatatctagaattttatctactaaaaccaattcacatcttatataaatcttatctaatttcaaaactaattaaggagattctcaatatcttttcaagttaacttaattaaaattatataaatgaaaaatcataaaaaattatataataaaagaaaatgtttttaagcttctaaactcatgaagtaacttaccaataagttattgattcgagtggtatattaggttagattcttataaataaggcctcgnnnnnnnnnnnnnnnnnnnnnnnnnnnnnnnnnnnnnnnnnnnnnnnnnnnnnnnnnnnnnnnnnnnnnnnnnnnnnnnnnnnnnnnnnnnnnnnnnnnnnnnnnnnnnnnnnnnnnnnnnnnnnnnnnnnnnnnnnnnnnnnnnnnnnnnnnnnnnnnnnnnnnnnnnnnnnnnnnnnnnnnnnnnnnnnnnnnnnnnnnnnnnnnnnnnnnnnnnnnnnnnnnnnnnnnnnnnnnnnnnnnnntctctctaaaaaagttcatgcaacttttatgttatatatatagagagagagagagagagtttattattaacttatttaatttttaaaataaacacatttaaacattaattattttactttaaagtaaattttatttaaaatcaattttacaaaggcagcacacttttcaactatctaggaggataacttatttttttttataaagttatatagatatagatataaatacatttgatatatatgttaacataatttgttatatatcttatttatattgtttttatttagaattatatttttatattcatattttgttaaaaataatatatantctctctaaaaaagttcatgcaacttttatgttatatatatagagagagagagagagagtttattattaacttatttaatttttaaaataaacacatttaaacattaattattttactttaaaataaattttatttaaaatcaattttacaaaggcagcacacttttcaactatctaggaggataacttatttttttttataaagttatatagatatagatatacatttgatatatatgttaacataatttgttatatatcttatttatattgtttcatttagaattatatttttatattcatattttgttaaaaataatatataatcatttaaagatatagtattttattatttaataagtcaaatattgcacgagatatgaaaattattaaataataatatgacaaacaatattaaaagatagaaattttacattgataatatgattaaatgaagaaaaaaatgagtcattcattaataatgtaaaattattatatattatcaactaatcataaatcacaatgtatggtacaccactagaaaatatgtttttaatattgattattttggacattcaacatcgattttgaatcgatgttaaaatgacattgttaaaagtaggttatttttaaatccactatacaatattgattctctccaaaactgacgtggtatagtagtagcaagtagcaaaaaaaaaaaaaacataaacgaaatcggttttggaaaaactgatgttgtaatacaccatacaacatcgattctcccaaaactgatgttgtaagacaatacaacattggttttggggataactgatgttgtttttgcttttttttttaatattttgtttattttattaaacaaacccaaataagcaaattaaaaacataaccaattcaggctataaccaaatcaatccaagcaatatattatattcaaattattattgaataaatactaataaatacaataatgttaatacataaatatcatctatagcctaagatttacataagtctaacatttgcaaaatttcttaaacattacttagtgcttcatttttaactcttagaaaacatgttacccactaaaagcgaattgtctttattctctcttattgcaatggtcttggatcaataaaatactacatgatataataaaaataccttaattagtgtaaataataacaactataacaaatgaaattagttttgaagtaaacaattaccattttccaattatccttgaaacctcctaagactatggttgacatccaatgcatgacgtaatagtcgcactcagtgcttcctctttgcttattacactaaattcaataagatagtcaaagttatcccaaaattagaatacaaagtaacaaaatgtcattttgaagagattaatcattgtttaaatgacttactttaacttgaattcatttagcaattgtcttggatttattttcgtgattattgttaaatcccttcaaaacactggttaagagaaacatgcatgtatattgtacaattaaaatattgatgtcaaatactaatgataaagtaaatttgttataaattagaactaacatgttaatgattcctttcaagtagatgtttgatttattgtgcaaggaatagaatcaggcaacaacattgtcattaggacatataaccaccagttgtcaatgttctctgcattggagaacattacgttattataatgcatacattatttaaattaatttgttcagttttacttacccattcaagtaggctcctaggtagacatttctctgttaattctacatctgtttcttaatataatcctcagattgaaagtgagattgcccatatctgtatatggactatggcacaagaaatccatatacagaggcatttccagatcgcagacgtaaatcattcatatgtttattattgttaaaataaagtaaattatgtatcgatttagaataatgaattaggtaacggactgtaatttaaacttacttacataatccacaattgtataacaacgacgttcagacattgtccatcgtgttctgttttcccaatatcttcatgctttatgtacaaggggacattatcattgtacatatcaaatatagttgcaccccattacacctgcataggcttgaggaaaaatattgggatcatcaatgtcatgtgatatgtgggtcgtcctcaggtttcgtcttatcaacaagcttcgtcgatccctttgttacctatttatcctacacagttaataaacataagtaaatggtaatcaacactttatttgtaacaaatccttttttaataataataaccacaacaacaaggaaatactttttttctgaaaaaggttgtacaagatgtgtcaaccaagtatggaaggtgttaagggtttgtcccactaattgaatctctttaatgggtacaggaacgcggacatcaacatctcaaacttcctcaacacccacctttaccaaatcattacctaaaggaacatggtacatgattgttgacccatcactaactctttcaagggcaaccaggcgaggaagattgtcatcaacatacaacccacgtttgtttgattcatccatgtctgggtcctgccctgagggatgaacacagcttccctttgtgttgacacgggcaccgaaaggagctaccttaggctcaacatgaggtacgattccatgggactgcatttggctaaactacaacattagttgtcttgtcactttttcagtgattgactgctctagctcatccttgatattctgtgtcagctactccttaatattttgtttgagtcaatccagctcttttgggatgattgacgccgatgtgcgggagcctactgaaattggtccaaagtattttctgatcgtcacatcgtctctagcagcacggacatgaccaggatgctctggtcgccaaatggcagcagttagtacatcctgacgtccattggctacaaagttaccctgtgcggactactcttctagaaaatcctgcaatcaacaaaatatgaaactgtttatggactatagttgttattatatatagagacaattgaaactaaaatctaacttacaatcctatcatcaatttggcatgccgcctcagatgtcatctgatccgattttttttgtgcgaaccaccttccacttcacgtgtcgtctaatgggagatggaggatcaacgattgttttggtgctcccaaattgggctgcttgctccaatcgtttctttggtttttcctccattaacttttgttcaagaaaatcataaccccaatgagacaacacatgaggggaaatgtcttgtttctggatagattgcgctttctttctaacatcctatgagaaatagataatatatgaaaaaaatgcttaaatcaattgtaaatgtcaatttcaaaaagttgaaggaccacaactaacgtcccatgtgaaaatgataggaatacttcataataaccaagagggagggtgaattggttattaccttggtattttaaaacttaaacaaatcagagtttcaggatctttatcactttcaaaaccaaggaatcaatttactcaatcaaatgtctcagccccaagaattcaataaatcaaaactgaacttgttaaacaatgaatttgaattaaagaatcaaagatcaatgaataagatgagagatagagaaatagaatcaaagacacaagcaatttatactggttcacttcacaacttgaagctacatccagtttcttctaatcaacactagattagggttccactattataaaattttctattcttacatgcaattacaacatctcccccttatcaaccctagataaagattagaaatctaaaacactattagattctaagagacaaagaaccagagaacactactctgctctttacactagagaacccttttctagatacaagcaaaaacccactttacaatagcaatcttacacagaaattcaaaaccagaattacacacagagattaaggagagagacaacctgataatccaatgaatgaaatgcaaatgaattaccaaattaagttgagaagaaatcaaactcaaagcatgtttttccttaatcttgaaacgaatcttgctccagaatcattcaaagactcattgatgttttgaatgaaacaataagtaaaaacactgagaaaatcacttaggaattgcttagaaggcttgtgcatactcaaaaatacgaatggtgaagttgtgaaacaagctaagccttcactcctatttataacagaatttgtaactaactgtaatcgattaaacgcgcctaataatcgattaatttgcttatgtaattgattaaaataagtatgtaatcgattaaactgttcaagaaggtttctgggtttttccaacgagcaaaataattgattatcccaagttgtaatcgattaaaacagaaatcttagaatttacaaaatacactatgtaatcgattacaatatttggtaatcgattaaagcagaaaacatatattttcaaagtgaacatataatcgattacaagctttggtaatcaattaaaacaggaaagtgatttttctcaaatagcctaagtaatccattacaatgtgtggtaatcgactaacacagcaaggcttaaaattcatgattaactatttaatcgattataacccttaagtaatcgattaaattcattaacaaggcatttttgttgtaaacaaaggctaaataatcgattattccgatgggtaatcgattacaatgttcataaagattttccagattgaataaagaacatattgatcgattatattagtaaagtaatcgattaaatcagtaaaaatagcatttttccaaaaatatttcatttagattaaaaccttaaccaaataatgaaagctttgttattttatatgaaaataatatagattaatgaatgaatgcaaatcatggatcaccagattagcctttcccttacacttgaatcaattacaacacttcaaggcatccaagcatgttgaaagctcaaaaccaaacttgaatcaaagtcttccattcttcatgatgctcccctatatccaacaatctctcctttttggctttgaacatgccaaatttttgattgattaagtgttggacttgaagttaattgagggagccaaattttgaaaaacttgagctttgcaaacctaaaaacaatttcaactctttgccaagaacatgtgctaatgcatctgttgattgatccagcattcatttacatttatattttacttaattgattaatttttaacacttagttcccccttaatttgacaatccattcagtttaagatttgggcaaaaaattgtgcagaaaaatagggtagaacaaagtgtactgcagagcacaaccaaatcaatcaatttctccccctatttggcttatcaaagtcaaaaaacatgtaaagcatagtggattatgaataggagaaacaaaaatggatatttatattaatgaaggaaccattacaatgcttaaaaatgaaaataaaaacatgaaaacataaaaccagaaaaaaaaaatagagaattaaagagtctagaatgacttagattcatcaaactgaatagtagcttcaatatcatctagcctagtcttaatctcttctaaagctgaacttgtttcagccctaaaatcatgatgcatagagattaagtcatctatcttctgaagcataagagactgaaactgagtgtaaaggggttgagcagcatccctttcatctttatcagcatcttttgcaataccagcagcagcaggaggttcaagcacaggttgtggaccagccatctgccatccttgtggtgtcttcaccattccaagtttgttgagatgcttgtccatgatgaggttgttgcttgagtttgtgtggtccactacctcatttgacacatcaatatgaaagtagtctatgaatctggatacaagcacaacataagggaatgggtagttgatcagccttctggattttaacataatctcctcaaggatgagaatccaattcatctgaattgaattctttagaccatacactagttgtaagtcttcatcagttgcttggacatggtttgtgcctctaggtgtgaggatataggtgataatatagtgcaaaagcatatcctcatgagtcatgggtccagtacctagcctagttttcaatctcatactgggatcactaagcatttctctatagatgttaaccctattgtaaccctcaggattttcatcaaattttctttctccttcaaaggagataccagcaactgtctcccacacctcatgggtgatttccatgggcactccattgacttgggacctcagtatcccatccatggatcccttggcacaggtgtaaaacaccttgaccaattcaaggtaaaaagtaccctttaactccacaaatttcctaagaccttgggtttctatgaaggtaggaaattgaaagccttccctaatgaaccaatcaagctctaattatttaggagaacaaacatgtttggtggcattaaactgaagataggtcatacgatccttctcatttgtgaaccaaaggtctaacctatttggaagaggggggtttgaagattcaccagcctttctcttagggattctggctctcttagaggtagacatcctagagagagactataatcacacagaataaagaaaacaaaggtttagaaggtagagaaattaggtgtgagtttgccttagagcaaatgttctatttatagaagattttaggctccaagcatttgaaattgaataaaatagctgttagaatgaattaactcaccgcaaagggtttaaatttgaattagctgggaattgagcaattacaacttccaagaaaatctgtcagatgttgcagtaactccttaaataatcgattataatccttgtgtaatcgattatttcatatgcagaaacactaacagcacacacagtaatcaattatatttgtaatgtaatctattattttgcaaccattcagaggtagaagacaatgtgtaatcgattatttcatgttttaatcgattattatagagagatttgaatttcagaaacatattttagcttgtgtaatcgattaatccaaaatgtaatcgattatttcataaagtattgaattttgaaaagtttgatttttagcattttaatcgattaccattcactgtaatcgattattccagtgaacgtttacattggaaaataaattttggttatagtaatcgattaatccaatgagtaatcgattattacagaagagaccaatttttcagaaagaacaaataattgattactttggtaatgtaatcgattacataagttcaattttcatactgaatgaggattttaatgattttaatcgattaaccaacacttaatcgattattagagagcatttatcagaagtagcaaaatatatgcagcatgacatgtaattgctatgtttttgtgatgaaggatttaatattcaaagtatttcacatgaaaaaggcatacaacttggtatcaaagcattcaagctaagagagattagattcatccaagattcctggcatgtttctacgagcatagaatatatctctagccaatggtttagtaaagaaatcagccaattgattattagtatcaatgaaatcaattttgatattacctctttgaacatgatctctgagaaaatgatgccttatctcaatatgtttgatccttgagtgcattattggattctttgaaatgttgatagcacttgtgttgtcacatagcaaaggtatttctttcaattcaactccaaaatcttgtaattgttgcttcaaccataggctttatgcacaataacttccaactgaggtatattcagtttcagcagttgacaaagcaacacaagattgtttcttgcaaggtcatgagatcaatgaatttccaagtaaatgacaagttccactagtgctttttctatctaacttacatcctacaaagtcagaatcagaataactaataatattaattgaagcacctttgggataccaaagaccaacttttgatgtagccttgagatatatgaggatccttttgactgttgttaggtgagactctttgggatttgcttgatatcttgcacacaagcaaacactaagcattatatctagtctactagctgtcaaatacagtaaagatccaatcattcctctgaattttgacccatcaaccttctttccactttcatctgaatcaagataggttgaggttgctataggagttacagcatctttacttttctccatttcaaactttttaattacttcaaggcaatatttggattgattgagaaaagttccattcttcatttgcttcacttgaagtccaagaaagaatgttaattctcccatcattgacatttcaaattctttttgcatagctgtagaaaattccttgcaaagcacatggttagttgaaccaaagattatatcatcaacatatacttgaaccaataagatatcattcttataccttttgatgaacaaggttttgtcaacatgacctcttgtgaaagattgttcaagcagaaatttgcttagtctttcataccaagatctaggagcttgctttaatccataaaagacctttttaagtttaaaaacatagtttggatgtttaaaatcaataaaaccaggaggttgttcaacatatatatcctccttaatttatccatttaaaaaggcacttttcacatccatttgaaaaagtttaaaattcactaaacatgcataagcaaggaacaacctaatggcttccaagcttgcaactggagcataagtttcctcatagtcaatgccttctacttggttgtaacctttagcaaccaatctagctttatttctaactatgattccactttcatcaagtttatttctaaaaactcattttgtgccaataggtttgagagaggatggtctaggaaacatttcctaaacttcatttctcttaaattgatttaactcatcatgcatggcatgcatccaatgttcatcatnnnnnnnnnnatgtaaggcttgatcaatattcttaggttcaatttgagaaacaaaagccatattacaacataggtttcttaatgaagatctagtagatactccctttgaaacttcacctatgatgttgtcaagtgagagatctcttgttgttctccaatctttaggctcttgaacaggtgttgatggttttatttcaacacttggttcttctttctctttatttaaggaatcattaagctgaataaattcttccataggacctgaatctacatcacacttattttcctctttagaggaattaaactcatcacaaattacatatacagattcttccatgcacattgttcttttgttgaaaactctataagctttactatgtaatgaatatccaaggaaaattgtttcattagctttagcatcaaattttccaagtgatcatttcccattgtttaatacaaaacacttgccgccaaaagctctcaaatgagaaatgttaggttttctacctttgtatagctcataatttaaaataggttttataagtaatctattcaaagtgtagcatactgtacttatagcgtcaacccaaaaatatttcggtaaatttgtctcattaagaaaagttttagcttcttcttcaagagatctgtttttcctttccacaacaccattttgttaaggtgttcttggagctgaaaaattgtggttaattccattttcttcacaaaatttttcaaaatgttcattttggaattctccaccatgatcacttcttattgagataattttgctaccattttcattttgtgcaagtttggccatttttctaaaagcatggaaagcatcacttttggatttcaaaaatagagtccaagtaaatctagagtaatcatctacaatgacaagcccataataattgccacctaaactcatagttctagagggaccaaacaaatcaatgtgcagtaattcaagtggtctagaggtggaaacaatgtttttactttgaaaagaacttttagtttgtttccccttttgacaagcatcacaaagtttgtccttttcaaacttgagtttgggcaaaccaattactaaatcctttttaattagcttgttcatatgatgcatgttaatgtgacttgcccttctatgccataaccaagattcatcaatcttgcttattagacaagaagtgttgtgaaagaatgcatgatcaattgaaagtgaataaatgttacctttccttttacctatgtgaatcacttcaccactttgtccatcacaaatcatgcagcaattctcattgaatgagactttgaatactttatcacagagttggcttatgcttaagagattatgattcaatccttttacataaagaacattttttatcttggttttgaagctatctccaatgttgccttctccaatgatctttcctttgttattatccccataagtgacatatcgtccatctttaagagttagatttgtaagcatagacatgtcacccgtcatatgtctagagcatccactataatggtaccataatgaggatctagctcttagacatacctgcaaaaatcaaattaatttataaaggaaggtacccaattgaggttgggtccatagggttagcagctttctttttcttttgaacccaaatgcaatctccattaggcacatagaatctcctagcatagcatttgtaggatgtatgtcctttttccatacaatagttgcatgttacaaattttgatgtttttctaaaaaaaacattttgattgatctttgaatttttgaacttcttttgattcttctgttttggaggcacaaatacaatttttcccaaatcatttttgagccttgtttgtaccccaaaccagaaatatctccagtatatttttgcacacttaacatttcagccaagttgcattttcctttgtaatgctttctcaaaagatcaattaaatcatttttttggatatatgtaatatgtacttttctccttgactctttttgtaatcatcaaaatctttttgcaacaagttgtatttgtcaacatttgtgcaagaaagaagcacatacacatccattcattttgtaacttgaaacaagtttttcattttcttctttcaagttgcaaatcttagtttgcaactcagcaatttttgcaacatgccatctaagatttcctttgagcttgttattggattttgtaagcttttgggcttcctcatgcatttcttggaaatcattaatagcttgttcaagttcagaatttacctcatctctatcacttgatagatcatcatcttcttcattgatagtggaagtgagacacatgtttgcttcttcactttcaggtgaagattctgaggtttttgactcattatcttcccaagctatgtaggctcttttagattttccttccttcctcattttgttgtccccttgttgttttttcaagtagattgagcattcagatttgatgtggccaggttttccacatttaaagcaaaaagttgttgtcaatcttgttgttgttgctcttgttgttctttgtgaaccttttgttcttgtttttcctcaagaacttattgaacttcttgacagccaagtacatgttgtcctcttcatcctcatcacttgattcttcctctttttcagcttttgaagttgcaacttttagtgcaatgcttttgcttttcttttttgcatcttcagcacaagttagttgagacatttcaagctcatattcaagtagcttaccaaatagtgcagccatggacatctttgataaatctttggattccttgattgttgtcacctttggttgccaaggccttgtaagacacttcaagatcttgatgtttaattcttcagggtcaaagatcttcccaagacccaatagatgattgacaatatgagtgaatcttgtctgtagttgagaaatgctttcatcggtgttcatcttgaacatctcatactcattgatcaatgcatgctttcttgatcttttaacttcttcagttccttcatgggtaatctccagtatctctcacatttcttttgcacttgtgcatctcactgttctaaaaaattcatcagaagaaagtgcagaggtgatcatatttttagctttaaaatcatattgaacaacattttattcaacatctatcaactcatcccattctttggaaatcaattcattggcaacagttttctttagaataaaaggaccattttctatagcattccaagcacctgggtcatttgattgaataaagattttcattctatttttccaaaaactgaagtgctccccttcaaacataggaggtctgtttagagaagcaccttctttgaaggttatttgtgaggtattcatttttctttttgaagaaaaaatagtgatcttgaataactctcaagaaccagctcttgatgccaattgaatatgataggaatacttcacaataaccaagaggggggtgaattggttattaccttggtattttaaaacttaaacaaatcagagtttcaggatctttatcactttcaaaaccaagaaatcaatttactcaatcaaatgtctcagtcccaagaatcaataaatcaaaactgaacttgttgaacaatgaatttgaatcaaagaatcaaagatcaatgaataagatgagagatagagaaatagaatcaaagacacaagcaatttatattggtacacttcataacttgaagctacattcaatttcttctaatcaacactagattacagtttcactattataaaattttctattcttacatgcaattacaacatctcccctttaccaaccctagataaagattaaaatctaaaacactagtagattctaagagacaaagaaacagagaacactactctgttatttacagtagagaacccttctctagatacaagcaagaacccactttacaatatcaatcttacacagaaattcaaaacgagaattacacacagagattaaggagagagacaacctgatgatccaatgaatgaaatgcaaatgaattaccaaattaggttgagaagaaatcaaactcagaacatgcttttccttaatcttgaagagaatcttgctcaagaatcattcaaagatccattgatgttttgaatgaagcaataagtaaaaacactgagaaaatcacttaggaattgcttagatggcttgtgtatactcagaaatacgaatggtcaagttgtgaaacaagctaagccttcactcctatttataacagaatttgtaactaactgtaatcgattaaacgcgcctaataatcgattaatttgcttatgtaatcgattaaaataagtatgtaatcggttaaaccgttcaagaatgtttttgggtttttccaatgagcaaaataatcgattataccaagctgtaatcgattaaaacagaaatctcagaatttacaaaatacactatgtaatcggttacaatatttggtaatcgattaaagcagaaaacatatattttcaaagtgaacgtgtaatcgattacaaattttggtaatcaattaaaataggaaagtgatttttctcaaatagcctaagtaatccattacaatgtgtggtaatcgactaacacagcaaggcttaaaattcatgattaactatgtaatcaattacaacccttaagtaatcgattaaattcattaacaaggcatttttgttgtaaacaaaggccaaataatcgattattccgatgggtaatcgattacgatattcataaagattttctagattgaataaagaacatattgatcgattatattagtaaagtaatcgattaaatcagtaaaaataacatttttccaaaaaacctttcacttagattaaaaccttaaccaaataatgaaagctttgttattttatatgaaaatcatttagattaatgaatgaatgaatgaatgcaaagcatggatcaccaaattagcctttctcttacacttgaatcaattacaacacttcaaggcatcaaagcatgttgaaagctcaaaaccaaacttgaatcaaagtctttcgttcttcatgatgctccccctatatccaacaccatgaaggttctctacgactttgacaaaatttgtttaacttttctttgctaaattcgtgcttctcatagactttgtcatcgtcatcctccttgccctctgctagagctcatttggaggtcaaatcatatttaatttgcctccaacgctcttctatagtctgtaggattttctttttcatccttttatcaaaggcttcaagaatatcaaatttagtcttaaatacaaaatgaattgtaagagttagtgaataacaaaaatgtgtcgatttaatatatccaattaccataacatacaagtttcaattgaaatacctgaatgtcctcccaaatcaaatccttatgagctgcaagaacctgtttccagttaacatatgtaacatccaccttctctcaagcgatgaccctcaaatttaatttcttttagtggggaccatcagctttcccagtggcactgccataggtctagcagacaacgatccgagttgtgtggcttttttagtcatcatcgaagtagacgatgaaggtgctgacttaaaaggataggagctcagtggtgtagtcatgtgtctattaaaaaacaaaattgattaaagtcaactcaaaagtatagtaagttatgtagttgtaaataaggaaataagtatatataaaaaaagattacattatacgatgttaattaattatcttcatcatgatcattacgatttgcatgaatattgttaacttcttcttcttcttcattgatgttaggcatgcgtgtggagaaaagagtgtgacaattatcaagggttgaatcatcatcttcaagattaacaccaatggttattctgtgtaaaaccattgaccaccttttatcacaaggatcttgaacataaaacacctgtttatcttgttcttctataaaggctcgttctgataagctagcttcttcagatctaccaaagtaaacccaaaatcatcggttcacatatcgatattactatcaacccacttacacttaaaaatacacacacagtgaatttaacataattaagctcccagattttttcaatgactccaaagtaagacgtggaatgtcatcatttacagtagcaaagtattgggattcagccttaagactaacccattattttgcactttacttttgtcgtcttatgattttgtgtagaatgaatacttgttgatatcatatctctgccaagttctaaaatttcttttaggcccatctcctaacttaacatttcataagcattatcgtcaccatatattgtatctttaaaccaatttaggaaagtcttgttatgctcttttgacaccctattcttggtcatttttgggttactttcatcgaataaggctttgtgacgaactatatatgacacaacttcattactattattcaatatatacaaattggcttgtttcaattcatatagacccaaagttataacaagtagaccttgtgaacccttacctcccactttctcatcatgccgagactcgggaagtccaataggttttgcattttcaatgtactctaaacaaaactcaatagcttcttctacaatgtacctttcaacaatggatgcttcaagacagtgtaaattctttgaatacccttttaagatcttcatgtatcgctcaattgggtacatccaccatatataaatgggaccatacaatttaatttctctcaccagatgaacaattaagtgaaccatgatgttgaaaaaacattaaaaaagatgctcaagcgagttatggcatgcctgactttgttaggtaagatgtttcatattgcaagagttgttgcatcaagacgtggaaatcatgagctttaagccaactaatttcatatctttcacctacacaagactcttaatatttgaagagtatccctggggaactttcacactctgtagacattgacaaaaacttgtttctcatttcttgaaaaagtatggcatgctggaaacaagtatattttcttaccatcagacctcggatgtaccttgtcacgtatacccatctcagctagatcttgacaagtattcaaaccatcctttgttttgcctcaaatgttaagaaacatgtcaatgacactatcacacacatttgtcttcacatgcatatcatgaatacaatgtctaacatctagatcggatcagtatgaaagatcaaagaatattgacctcttttttcatatgcaagtttcacttgtcagcttcttttgggtctttccaaatatagtattgatgtcctcaacctactcaagaacctactaaccaattaagggtatcagcgtaatttcatgctcttggctgacattaaaaccttttttcaatcgctggtaagggtgataagttttcagaaaacatcgatgtcgaatataccttgtttttcttccatgtttcagttaaatgtagcttgtgtcttcttcatagatagggcatgcacgatggcccttaacactatatccactcaaattcccatgttagaaagtcattaatggtacaaaataccattgcacacaacttgaatgtttcatttcaatttccatcaaacacgtcaaccccctcgtcccacaactttctcaactcttcaatgaagggacttagattaacatcattgtcatttcctggctgtcttggccccatatcatcataaataacatcatgtatttttgcttcatgcacaaccaaggaggcaagttctaaattactagcaaaacaggccacgaattgtgcttagtgcttaaactgccaaagggattcattccatcagtggcaagtccaagcctaagatttctttcctatttctcaaaatctcgatacaaacgattaatcttcttccattgggaagatcatcctaaaggcagagcattccattgtagtttattccatctgcataccatctaaggttatttgcatcatctccattaggaaacaaatgtttaaaccttggaatgatagaaagataccataacacctttgttggggatctttctttctgttttcatcactgttacacttgtcatcatccttcactttgtactgtgataccccacacctggagcatttatgcatttcttcaaactcatatatgtacattatgcaatcattaaggcatgcataaatttctaatactccatatccatcatgcgtagtatttttttcgcctcatagtaaccttttggcaatgtgttcttttggaagcataccctgcaataccttaagcaacaaagtgaagattttgtcactccacccatatctgaccttcacattaaccagacttaataacgttgacaatagtgtcaatgacttcttgcaccttagatacaaaggtttcttcgaatcattttccaatttattatacaaaggggcatgtgcttgcttaaaagactcttgtctaatatcacaaatcacatcctttaatcgatctcccatttctacatcaattgattcagtttgggactctctttgcatttttatcaattcaccatgtcatatccatgttgtataattcttcttaatcccatcacacaaaagatgttcctgtatgttgtctactacttgtcgtctccgattcaaacagtgtatacaaggacataaatatttcctatccgtattcggtcgagctctttccaaggaaaattccaagaattgttcaaccccttcctcatacgtagggctcatgcgacttgtagtcatctaacttcgatccatctaataactgtgtgatactcacaaagttattccatgcatgaaaacctaatttttttcattaaaggtgtggccctatcccatttaggaaggcatttttataatagattcatacgtgtaggttaagtctttcttcttagatttgacgaaattttggcaacatttagcattgatctccaagtagacgacatgaaagcggtgatatgaatttcaccacagtcaagtatgcacccagagaacaaagtgaaatgcactatgccgaaatttcatcaaatttaagaaaatagagttaacctatacatatgaatctactataaaaattattcttcccaaattgtccaaatggacaattcaagaatcaatacaacgataatccaaactatccgaaataatcattgtattgaatctcaaacgggaaactaaagttcactcataatgaacataacttatatataaaaaacaatcattaatagaatgaagagatacattaaagtaatcatagcatacacaacttttatcaagtaatttcaaacttgtaacagattgaagtgaatatagtatttgcagtgaatatgtgtaacagattgaagttaaatatttgcagtgaacatagtatttgtaagagagttgttacctcaataactggacttctaggtgatctacgatcaatgactatggggttaacaacaaataacaattcttttatcttctctcctgctaattaagcttcatcaaacatgaaaatgttgcaattagaaaatcattaattctaaatcaaattgtactaagcatcatagaaaatgatatgtatgttatatctccctttagttttccaaatataactttatttcaattctaggagtaaagaatgatcatacgcagagtctagaggtagaatttgatcaacgcctaatgttgacaatccaaataaacatgaatcaaaataacccaaataaactggactagatgatgtgtagtctataggaatttatggaatcctgggtatagggaaatcaacgcttgctaaggatgtttataaacacattgttaatcggttttagagaaatttcaagtcaaacatttggcatacaaaaaactacaagaagcatttcttttagattttttgaaccataaatattttaaagtaggaaacaaagatagaggagttaattgctcacaatgtggaagtagcctaaaaggtgactaggtgagggcattaagtcatggccaggctcttgatctgttcagtttttgaaaacaatgtcatccaacaaattatgaggaactatgtcaagggactgccattggcactaacaattttggagtctcacctgcgtggtagagataaagcagaatagataagtgcattagttaaattgtttttatacacataactcttaatcgaactctgaattacatacttaagagatatatcatgcataatgaaattgaatgtgtaacaaaatgaattattgccgaattaatgaattgattgcgtaaagaattactacaatttaactaatgcactactataaattaatgaattgttagtacttgtattttgtcaccttcaaataagttttcaaacgtttagtaatttataattgcttcaagttctattaaaacttagtatttagcataaaaggtagcatttatgtttatcagttcttccaacttttttctttatgatattcattatgatttgcatgttttgagaaaacctttctcatgtttttttctctattcaaaagctatcttaggaagctgatagtgaatcattttattttccctcccaaaataagctacgtccaaacaaccatagagttgtagttttagttgcttcaatcttctattttttcgtttgtgcctacttgaaatttaactaactagatgagcatgtgagctatcaatagatcattaccacaaaccatagggtagtcttttatccctgtagacttctttgtctcaattgtttgaacatttgcaaatgttacaataatgtaaaggttgactagatatgtttgacctttcctttctatacaaataaagttttttgggaaatatttttattctaaatctataattaaattgagatacaacatcactgttcgattgactaaatgaatttcccttgaaccaacaggtctacaaacgacgttatgatgtctgcatgtcgctatatgagaaagaacttttgacaaagaactcctatcttcatatatatgggttcgtcaatatctattctttgattaattttgcattctatgtaagcaacaattgttcacccaagcttttttgtatatcctgattgcttttctaactcttctatataaagggagtatttattaagttttgttttgcatgtaatgcataccaaaaagtgaagggggccctatttggagacagactgaaaaccatgcctttcgaaccgaacacaacactcgtcttccaaattcaaaacaaaaaagggctcgttgtttaactaatgcacttatccattatgcaataaaaattgggtgtaacttgttaagcaatcaattttgcaataatttgttaattttgtaggaaggggcaatagttaagcagtttaactaatgctcttaagagataaagtagtttaaggaattactattgtttgcataaagaaattgatttttaaaggcattttttacctcaattgtcgttgttagacccgcatcacatgacaccatgttattgtgtttgaatttgagaactatttttctttgatttaacatcaaagtctcaatatatcagtacacatttatgttcattataatgtctatacatttataatttaattttcattactctcattcatttaaactaataagatttaaatttcaaaagtaaattaagtgtgtacatttttaattttttaaatctaactgcttgtttggaaatatgtaaaatccatgcatcgagtgaaaaccatgtcaaacaactaatattttgatcactaaatattttgattagaaaaaaggggaacaaattaaactactagttattcatccatcttttacatatgaaacacccaattattgtgtatacaatatagataacaaacaaaagtaatagttgcaaattcagtaatgggagacgcacagagtggacaggagcaggctaattaggggcatatataaaaaccaccatatttttattcacataagaagaaagtcaagaacggagtcctcaccgagaagctatagaagcaagatgttcttgcgcgttgaattaactacaacccttcttgttcttgcgcttcgaacaaagtcctcacaaaattatgtgcacaattccctgtcaaataaagaagaaaaagaaaaaaaaagttcaatatgttcaatgcatttgtgctatgaattatcacatatgatatcgagagagagaagagcagtgcagtggagttgtgagtgagagttcagaagcgtcgccgcaaagagtgagagtgagagtggaatttgaggtcgcaaggtagctcgaggagttgaagttgcacctatgaggtttggaaatgaggattcagagatgagatgagagtgagagtaggtcagagttagcccgagaagagagtgaaacaaattcaatatgggaaaaaccgttgttaacaagtgtcaaataatttcagtttttgaaaaatcgatgttaacaagcgtcaaataacatcagttttgataaaaaccaatcttaatagcaaaacacaacatcggttttttgaaaaatcaatgttaacaaactcatgttatttacaaatatgtaaccgcatttttgttaacatcaattttatcaaaaaccgatattaaagtgacgatgttaaaagcattctttctaataatatgattctgttaatttttatgataattatcttaaaaatcatatcagtcatgatttttgatttattaataatgtaagacagtttaatgttgtcaatgattattaaactatgaaattaaatagttttgctcataaaattgtcaaaatataattccaggatatagtagcaagaatataaacaacactttttttatctttttttaatatatatttttgttggttaaaaagtttaataaaaataacaaaatttgaccgacaacctcctattggattaaataaggactctataaaaagcaatattctttttttttataaagaaaaaacatattaataaaatgtgtttacgaggagaaaatataaatatataatttaaggacacagcgtttgtcgttggctgttgttttccttaattaactgcactatatatgcagagcaattaaattcatatctactttgttaatgtgtgtatctgctgtaagtaaatacgagtaaaatacattgatgttacatataattgcttaactgtattagttcactactattgtcacagaattaacactatttatcgtcacccacgtgattgccttggagtatattatatgacggtaatagttatacacctaattttggtgcttgcaaattgtatttaataactgttactaaagatctgttatgcatattcaactctgacaactgagccaatttatggctatgtgattatgaaagcttaatttgtctacagaaagctttatacaacacaacagtaaattatataaaagaatacattgtatattttattgacagcaataaatgtttatgaaaattttacatttattattataacacgctttgaagtttgaacaataaaattaatttgccactttaaatcgatttgtcggttcgttcttgatatatgaattgttgtccacaaaagtatactttaatttaattagactaacaaaagatcaacaattttacagatcaaaaagaaaatatcaacaagtttgattgttatgcagtaaagtcttgtaatattcaataaaataaattagcattggttaatataagtatattattattattattattattattattattattattattattattattattattttattacactaattctgacttgactttaaaatttattttatcacacactaaatattgtcagatagatgtactgtagtaaggtttgattatttatttgcatgaggtaataaagtatttatctctctaaattttgcatgattttatagtagaggaggcaaactcaagcccgacacaattaatatagacaacggactattacatagtaagatcagttcaacatatactactatttactactctaccaatttttaccgtaaagatctttttaaataatttattaaaatcactaaaattttatttgaggtttagttttcaagctctctaagatgcaaaattatttattaaattttatataattaattgcctttattatatattttaattaatgacaaaattattccatttaatatatgttacgttgacattatttattttaactaaacataatattttattatgtatgagtaacatatgtgtaataagtactccttgatattaattttagagacctttggcaagagtagaatcgagttcagnatacattagtatataactcattaggtttttagaataaataattttaaaataactgaaaattaatattaataaatatctgtatttaaaatatcatcccaaaatgtatattaaaatattttttatcaacatcaaaatgccttattgcctttaaacccaaaatagttaaaaagagagaaaatgataaaactcaatggaaataattgaaatatacttgtttggcaactacaaatgctaaaaaatgtagctgatgttagaattagttctacatgaaaccataattttgcttgtaaacacaactaattaaagagacatgcatgctataattacgttgatgtttgattcatgtgaatggaagtttgaaatgcttagattcttaaacatgaaaaaagaaacttcaaggattatgaagctagtttaaaaaaatttagaatccaaacatttcaaaaactagtttactagattttttgaacgcattaactccttttaacacattctctctctctctccattcatcaagccaataattgaggaaatgaaacgttttgggcgaaaaatcttcaaattaaatgnnnnnnnnnnnnnnnnnnnnnnnnnnnnnnnnnnnnnnnnnnnnnnnnnnnnnnnnnnnnnnnnnnnnnnnnnnnnnnnnnnnnnnnnnaataaaatttattttaaataataattactctcttatgataaacaaaaaatattttaaaaatttaatgataaacttttaaagtagtgtatttaaagaattattttactaaagggatatttataacaaaaaacatttattttcaggaattttattattttcaagaatgatgataattatgattaggtatttttaggcatgaaaaaacttttttctctaacaaaacgtctccttaggttaatatgttgattttatgttgctctaaaacttttacatgattaacttagactgtatcattctcatattaaaatttttgagtattcgattctcgaatgattttttatatnnnnnnnnnngggaaaaaaaaaaaaaaggacagtggtatggtatgataaattccagcttcataatacacttagcatgtattaaacatccctcacaaaaataaaaacatctatcgaatatcgatcgtgttccagatcctactattcatcgtatttgcctgcatatatcatttaccatactttaaaactttttttgattacaatgcagatgagatgtgtttagtgagaaagtaacttttatacgacaacgaatatataatatgtataaatataattaactaagactatttttttattaaatcgtataaatgcagaggtatccttttcatatgagaaagtcacatataattctgagtgtaaacaagtttatattatgatattaaaaatgttttccttttttgaaaaacttctgagtgtaacaaagttcatacctatatttaacgcatcaatttcaaaaaattcaggcggttgtggtaattcatcacatggcaatgtactattgtaccacaaataacagttactttttcactttacacaaaaattaatatccttgcatttatgtctaattatgcaacgaatccttggggcgttgagccgttgaggggtaaaaagggtcctatcctttcatatactggttggagtaatatgtttattatgctattaaatcttggggtactgtgagtaatattatatgtcgtttttttaattgattataatatcaaaagatttataacatttatgtattgtactcaataaattaaactagacttacttaatatatatatatatatatatatatatatatatatatatcgtttttatgtaatcctctttttctttttagtttttgacacgcactttgtgttaagtctgactatataatattaattttcttttgtctataaaattttcattttttttatagacaaaaaaatatgtcaatttcctttcgctacagacaagttgaagtgcatgtaatgtaggttatatctattgagaatttgggaaagaatacctgaaagcgaataaccctaatattaattaaaatgaatgaatgaagtataaaaactatatataaaatcctttaaaaaagctatatataaaataaaagaaatataaacttaatgttttgaaaatcttatgttagaatctaaagtaaaatccctcaaaaatcctatatatatatatatatatatatatatatatattaaattccagtagtttcgataatgtcaacagcagcagatggaaggtcgtaacgcctacctagcctacaatttacgacttgttgtttatcttcttatgattccctttacttttaagggtcaagtgtgataaagtgcatctgaatatgcaaccaacgtaccacggcttaaacgttggattcgattcgattcgagcatcttcttacaagaatatatttaagaaaaaagcaaattacacagaactttttgtattagatatagtgaaatgtttacacaaaatttactcatatgtacgaagttagttggattcaaggcaatataagctgccagattatgtatgcattgtggagaatagttatatttgcacgaatttggctagattccatgtacgattctctcgcgtttcataaaaataaaaattaataactcaaatttgatcgaaaactataacgtctaacaagaaaaatatagatgagattagtagaagggaatctctgggttactggccagcagtcagtgtacgaaaatatcataattttacgattcagcagcaaataaaatacgaacatgcatggattgcgatatgcctaaccatattaatcaaattaaaaaataaaaaacaatggtaagctatataattgcatacttttagggctcattgcaaacccatatgaatatctgacaagagttatcaatgacggattctatttattctcaactggttgcatattaactaaacaaacctaaaagagtgatgaggcacacattgagggtttcctaacatatattccggtccaaacttatcttaattaatttttgtaaatgtgcaaaatatccaatgtgaatcttaatttattggcgaatttgaattgactatctttaatcaggcctcttcttttaattataaagttgttgggggagtgagtaatttttttttaagtatcatgggtctgattcaaccaagttaggagcaagtgctactttcgattggtgaatcaaggtgatattatgattaaattagaagtagcttttggaagatcggtgtgataattaaacattaaaattaaaattggactatttgttgtttagaagttgaaagtcatttaattgcatgatcgaatagggttgcggatgcatattatgtctatttcgattgtacaatcgaaacgtggaggtgaataaagagagccacttggtgaaatattcaagaaatctctaagtgtttgatgagtttgacttatggaaaaactttaaaagacaaaaagcgttcaacgttaacaatgaattcatacggaagatatatgtctctcaagagtgcaacagatgatggttaccagcggttccctgacaaaagaagtagttaattaccaacgatttttttatacgcgtgtatcaatcaaatatatatgattatcaaaaactataaatagcacaataataataattttttcttggttacaaaaattacacaagttctattaccctatcataccacacttgggaaatagtcactgatcttaacaacaacatgtatgttcaaatattgtcatcactcttgagttgagaagagttgaaatcttatttttgaggttatgctcgctcctaatacaatattttattggcttaagattataggccaggtagattgctatttggtgaaaagatcggtttgtatgtccaggacaagagttaacatcttcatgtatcacatcaacatagtgcctaatcatcaatgacacattaacaaaaagtgtgatgccagcaaaaagggcactcagcaaccatgacaccacattgttacaatattgggactaaaaaaattacaaaaactaaaaatgaaaatataaaattatatattaagatgaaaatgaaaaaaaaaaacacatggactaaaaagaagaaaagtaacatatttttaggcacaaacaaatattcaagtcttaaatataatgtataaatttaatttaaaaataatataaaataaaaacttaaataaaagaacaaaaatatttttttnaatgtataaatttaatttaaaaataatataaaataaaaacttaaataaaagaacaaaaatatttttttaaaaaaatcttgcattctcttaacctttcttcattttctttttccatattcaacaatataaaattactcacgcatttcataaactccaagcatcctattggaaacttacaatttagctagtgtaaggcctaagttggtaatttgacctatttattaaaaaatcaaatttagacctttttaaagcctttttaagtaaaaagtctaagcttcaatttttttttattttaaaaaagtctattaggtttagtatttcaatcatgccttttttttaaatcatgacttagtatctgaataaatgttttctaacattatatatttatataaatcattttatataaaaaaatgaaaatacaatttacaaaatttaattatttttaaatttaattcatatgaaaataatttaattataatctcattaagctaagattttttttttcgaaaatggtnnnnnnnnnnnnnnnnnnnnnnnnnnnnnnnnnnnnnnnnnnnnnnnnnnnnnnnnnnnnnnnnnnnnnnnnnnnnnnnnnnnnnnnnnnnnnnnnnnnnnnnnnnnnnnnnnnnnnnnnnnnnnnnnnnnnnnnnnnnnnnnnnnnnnnnnnnnnnnnnnnnnnnnnnnnnnnnnnnnnnnnnnnnnnnnnnnnnnnnnnnnnnnnnnnnnnnnnnnnnnnnnnnnnnnnnnnnnnnnnnnnnnnnnnnnnnnnnnnnnnnnnnnnnnnnnnnnnnnnnnnnnnnnnnnnnnnnnnnnnnnnnnnnnnnnnnnnnnnnnnnnnnnnnnnnnnnnnnnnnnnnnnnnnnnnnnnnnnnnnnnnnnnnnnnnnnnnnnnnnnnnnnnnnnnnnnnnnnnnnnnnnnnnnnnnnnnnnnnnnnnnnnnnnnnnnnnnnnnnnnnnnnnnnnnnnnnnnnnnnnnnnnnnnnnnnnnnnnnnnnnnnnnnnnnnnnnnnnnnnnnnnnnnnnnnnnnnnnnnnnnnnnnnnnnnnnnnnnnnnnnnnnnnnnnnnnnnnnnnnnnnnnnnnnnnnnnnnnnnnnnnnnnnnnnnnnnnnnnnnnnnnnnnnnnnnnnnnnnnnnnnnnnnnnnnnnnnnnnnnnnnnnnnnnnnnnnnnnnnnnnnnnnnnnnnnnnnnnnnnnnnnnnnnnnnnnnnnnnnnnnnnnnnnnnnnnnnnnnnnnnnnnnnnnnnnnnnnnnnnnnnnnnnnnnnnnnnnnnnnnnnnnnnnnnnnnnnnnnnnnnnnnnnnnnnnnnnnnnnnnnnnnnnnnnnnnnnnnnnnnnnnnnnnnnnnnnnnnnnnnnnnnnnnnnnnnnnnnnnnnnnnnnnnnnnnnnnnnnnnnnnnnnnnnnnnnnnnnnnnnnnnnnnnnnnnnnnnnnnnnnnnnnnnnnnnnnnnnnnnnnnnnnnnnnnnnnnnnnnnnnnnnnnnnnnnnnnnnnnnnnnnnnnnnnnnnnnnnnnnnnnnnnnnnnnnnnnnnnnnnnnnnnnnnnnnnnnnnnnnnnnnnnnnnnnnnnnnnnnnnnnnnnnnnnnnnnnnnnnnnnnnnnnnnnnnnnnnnnnnnnnnnnnnnnnnnnnnnnnnnnnnnnnnnnnnnnnnnnnnnnnnnnnnnnnnnnnnnnnnnnnnnnnnnnnnnnnnnnnnnnnnnnnnnnnnnnnnnnnnnnnnnnnnnnnnnnnnnnnnnnnnnnnnnnnnnnnnnnnnnnnnnnnnnnnnnnnnnnnnnnnnnnnaagtcgatagacgtttatgtatttaataacttgtataactttctatctgtatgaatttttttattcagtgaaaatattagttcctgacaagtatgacagtgttcttatctccttcgggttttagagagtttttttcaatgtaaatttacaatttttcccggaatattatcaggagatttatgaaatgtatactaatttaaaattttaaagcctacttgcaccaagaaaaataataatagaagaaagcacagtgaaaggacacacaacaaacttagagtattattagatacacaatcaatagcccgaaccttctgtgatgctacattgcattcactcgtgcattaatcttaagagctgtaaattgaaaagaaattaaatttggtgacacgatagtaaatatgaagatggaacccattttttgttccagtgagaatttatttcaacagttatgatttcgtattattgtgttcagacctagctaatcaataaatagctaatacagggaaaaaaaaaatacaaggaaaggtgtgaaatcattatttttacatttgcattttatcggatttgtgtgtggaggaagggtcatctttgttgggttatggttgcctgatcgagtataaggctattggctttcaagatatatgttctcaaaggatttggttttaaactaagatattttatgtggcattttcacttcattattaggggtagtttggtgtcttggtattttcttgtaactctttgcagtttgtattttgattggaaaccctgtgcttctagtgatcaagatcttatatctttaatacaatgtttaagttgtcatgacaatttaataacttctaacctttttaaattataaaaaataggttgttagctaactatagtgatagttattttagattcacttatttttgttactctaagaaccttatgttagaatgtttgaatcataacaacttagtacttttatcttttaaaaaattaaatagatgactttcttttgtattttcatgcaaataatagtttatattaatcaatttcaattttttctaaaaaaatataaatttgatttatcatttcacttgagaattatacataggaggaatgacacatttttctcatgttaaagaaaatattttcatattttaatccaaaaaaatgtttaatttaattaataaaaatttatcgaatgaaaccttaactagtaaggtctgaaatatgtatatctaaaaaaatgtataaaattcctaataatatttataattaactaaatattttaattgtttctaacaatcataattcccaaaatttataattaccaaatgtgaaaattttctctttctaccaaatgtcacctaaaacaaccagccgtataaagcaaacatattctgtgccaacaacacgtttacccaacttattacgtaattgctcaagcatgcaatatcctatttcaaatagaagcgtataagaaacaattttttttccagtgacagcataaattccaatgtataattttctgcagcctgcctaaaatcccttactacttattacctaattgctcgaagcatgcaaaatcattttaaattaggtccaatcaaagcttaaataatataaaatagttatgagaaaaacttggtcaagaagaatttgaattattgaaaatatgaacttgctcactcaggaaacaatgcagacgaatttaaaattcctttgaaagtaaaatatttgattacaaaactgtatgtaaattaaggaacttagtttgacataattttttaaaagtaaaaatagtttgacgtgatttcttaaaagtaaaaatagagaaaacctgatatagtaaagaaaagaaatgggacatatttatttggattttatttttattaaatattattaatattttctttagtttggttagaaaaaaaatgaataattaatattgccttacttgtgatcctttatacaacgaatatgtagatgaaaaactatctcctattgtctaaacgaataacaaattttatattttatctaaaaaattaatagaaataattttctctcttgaatttaataaattaaactaattagtttccaacctaaaaattatttgtagcatgtaaaaaaaattcattatagattcagtgacttaatttgtttatttacaagcaaatttgtcaagtgtcatttttttactttaaaataaactaatatctatatattctctaaaacacttgaagatatgatgataaatcttttgttcgtgttacatgtcaatcttgtatcaaaagtaatgtcagtttatataaatatatatagcacacaaaagcacacgtttcctgtagtaacctttacattcatgtgctctaccaaacagtagtaaatgaatggaaaaaaaagcaaatgtgaaaatattgtgagagtgcagcctcatgagccccacctaattaaattcaacgtctaatgtgtatatatgttctgtgcataattctgcaaataatgcaaggtagcaataggtgttgattagtgatacaaattcttttgctctgatatggaccacagattgcttcttggtggatgctatttaattatgaaatatcagaatatttatataaataaataaaatgggtatcttgtcttgaggggttatacaatattttttcttatgtcgtgtagcagggaaatcttatgccccttagtataggaagtaaagaaaagcgtgtgtactttcttcagggacggagccataaatttggttccaggggaaccaagaaaaaaataatataattttatagaaaaaattaaatttttacatgttaaaaatattaaagaaaataatatatcgaatattttcataaataaaaatatatataactacattaaatttagaaattttcatatatcattttatcttcttaaatatcatctaacataataattttcatatatatcattttcctataattttattataaattttaggaaaactataaaattatttatataataatttatgcacatttaaaaaattaagggggccaaggcctgcaggtccccctccctccgcccctgcttgtgcatatatcttgtgcgtggatatatgcttatatcttgtgcttcgctcattccatttgcacctctttaatttcaacccaaaaaaaaattgcttatcaaatatataatttttaacaaaattttaggcagtaaattttatcaattcaaacttgagatttgaatattttgtatcgttaaatctacacagttttagatcatttaaaattaattgaaattttattggaccattttattttgatgtacaatatgctattgaaaatcaaataatgtttttttttttaattttaatctaattataagttgatatgtataataaatttattgacttttataaaaaatagtttaacattcatgctaagaatgatttatgttctattaataatatgaaaacttaaaacaaatggtgcatactttttaaactctttggttaattaagatatataagtaattttttacaaataaattagatatctacaattgtctaaattaattatttgaattttagtatatatggttatcaaaataatatacataatatgataattgtgtcaataaagtttaataactataaaatgttaacccatgtagtgttggccttgctagaaaggttgggaatttggataatttgtgtcaagtattagattcaaaccatattatctcggcattgggaacccaaaaaataactaaaaaatattattagatgtactgttttcaaaatattgcttttagtgtatgtgtgcacacgtgtttgtgtaaggagagattaacttattctaggaataatttgtttaataaactggcttgcaaagcatcacgtctatacaatgtattctaactaggttggcacacactgctgataggttgctaatatatggtgaaatttaggatagttttagtcaaaatttagtagaaaatgttagataaatgatagaattaaaccaaaagttcaccactttgtgattattattacttattgttatttttatacattttaggtacaataaatgaagaaacaagcaataaaaagaagcaacccagaaatacagccagtcgcgcgacggttacggaactgaagatagaatgcgattttcaagataagataagatcaataggcttctatggaattcaaattaaagattaaaagataagataagattaatgggcttctagagttatcaaatctatctataaataaagaagctacagacgacttttggggagcagtaatcaccagaaaacgactttcacatgagcaatatagagaacaaggcagagaacaatcataagaagggagaaacgcattacgcgaagggatttaaggttcataaggaggaagccaagattgagggtttgaatnnnnnnnnnnnnnnnnnnnnnnnnnnnnnnnnnnnnnnnnnnnnnnnnnnnnnnnnnnnnnnnnnnnnnnnnnnnnnnnnnnnnnnnnnnnnnnnnnnnnnnnnnnnnnnnnnnnnnnnnnnnnnnnnnnnnnnnnnnnnnnnnnnnnnnnnnnnnnnnnnnnnnnnnnnnnnnnnnnnnnnnnnnnnnnnnnnnnnnnnnnnnnnnnnnnnnnnnnnnnnnnnnnnnnnnnnnnnnnnnnnnnnnnnnnnnnnnnnnnnnnnnnnnnnnnnnnnnnnnnnnnnnnnnnnnnnnnnnnnnnnnnnnnnnnnnnnnnnnnnnnnnnnnnnnnnnnnnnnnnnnnnnnnnnnnnnnnnnnnnnnnnnnnnnnnnnnnnnnnnnnnnnnnnnnnnnnnnnnnnnnnnnnnnnnnnnnnnnnnnnnnnnnnnnnnnnnnnnnnnnnnnnnnnnnnnnnnnnnnnnnnnnnnnnnnnnnnnnnnnnnnnnnnnnnnnnnnnnnnnnnnnnnnnnnnnnnnnnnnnnnnnnnnnnnnnnnnnnnnnnnnnnnnnnnnnnnnnnnnnnnnnnnnnnnnnnnnnnnnnnnnnnnnnnnnnnnnnnnnnnnnnnnnnnnnnnnnnnnnnnnnnnnnnnnnnnnnnnnnnnnnnnnnnnnnnnnnnnnnnnnnnnnnnnnnnnnnnnnnnnnnnnnnnnnnnnnnnnnnnnnnnnnnnnnnnnnnnnnnnnnnnnnnnnnnnnnnnnnnnnnnnnnnnnnnnnnnnnnnnnnnnnnnnnnnnnnnnnnnnnnnnnnnnnnnnnnnnnnnnnnnnnnnnnnnnnnnnnnnnnnnnnnnnnnnnnnnnnnnnnnnnnnnnnnnnnnnnnnnnnnnnnnnnnnnnnnnnnnnnnnnnnnnnnnnnnnnnnnnnnnnnnnnnnnnnnnnnnnnnnnnnnnnnnnnnnnnnnnnnnnnnnnnnnnnnnnnnnnnnnnnnnnnnnnnnnnnnnnnnnnnnnnnnnnnnnnnnnnnnnnnnnnnnnnnnnnnnnnnnnnnnnnnnnnnnnnnnnnnnnnnnnnnnnnnnnnnnnnnnnnnnnnnnnnnnnnnnnnnnnnnnnnnnnnnnnnnnnnnnnnnnnnnnnnnnnnnnnnnnnnnnnnnnnnnnnnnnnnnnnnnnnnnnnnnnnnnnnnnnnnnnnnnnnnnnnnnnnnnnnnnnnnnnnnnnnnnnnnnnnnnnnnnnnnnnnnnnnnnnnnnnnnnnnnnnnnnnnnnnnnnnnnnnnnnnnnnnnnnnnnnnnnnnnnnnnnnnnnnnnnnnnnnnnnnnnnnnnnnnnnnnnnnnnnnnnnnnnnnnnnnnnnnnnnnnnnnnnnnnnnnnnnnnnnnnnnnnnnnnnnnnnnnnnnnnnnnnnnnnnnnnnnnnnnnnnnnnnnnnnnnnnnnnnnnnnnnnnnnnnnnnnnnnnnnnnnnnnnnnnnnnnnnnnnatggttacacagacaaattcctaacagcatcaccacatgggaagagttggctgcgaagttcttctctcaatacttctctatggaaaagtacaatagattagtgaatgaaatcactaattttactcaacaacctagagagtcattgtgtgcagcctggaacagatttcaggagctgatcagaaaatgtccacaatacgatatgcccgttggaaagaaagtgcgaattttcttcaatggaatgactcctgactcaaggatgatcgtaaatgttgcagcaggaggatcaatcagatctaaaacagcaactcaaacctatgagttgattgattccctagcaacaaacgagaacgaaagcgtcgtaattcagcccaagagagagataattcaattggggagtaacgatgctatgctagcagaacagaagcttatatcacaacaaatagccaaactcaatgagaaaatgaataagcttcaaaattctgcagcacaaccaattagagctgcagtattcagctgtgaatattgtcaagacaatcatcagacaaatgaatgtcctacactgataggagcagattatgatcaagtgaatggtgtgtggtatgaccaaagaccccagcaaagctatcaaaggaaccataatttctctatgggtaacaactttcagaggaaatatcagggaggagggttagattacaaatccaacaattatttacaacctccacctattcctcctaaagagccagctgaatgggaaaaagctataatacaattgtccaagactactaatgaattcattcaagaaaccagagcccaattcaaaaatcaaggtgcatctattcacaaccttgaaaatcaaattgggcagttagcaaaacaacttgcagaaagacagccagggcaatttcctagtgatacagtagtcaatccacgagagcaagttaaagcaatcacaacaagaagtggaactgttatcacacctcaagagaagaccaacaaagtgcagaaaaaggctaatgaggaagacaaaactgatcagaaagaagagcaagaagcggaaaatcaggcacccacaggtaaggataaggattcagcagctgaaaagcctaaacaagtatttgatttttcacgttttgaaaaatcaccataccctatgaggattaagctgcaagagcaaaagaagcagtatgttaaatttttagaaatgcttagaaaattacatgttaatataccttttgctgaagctcttgctaacatgcctaattatgctaagtttatgaaagatttattatctagaaagcataaattaaaagaatgtgaaaccgttgtacttactgaggagtgcagcgctataattcaaaagcgagttccaaccaaactcaaggatccagggagtttcaacattccaattgccataggtaatgtaaatgtgggtaaggcattgtgtgatttaggggcaagtattaatctaatgcctttatctatgtgtaaannnnnnnnnnnnnnnnnnnnnnnnnnnnnnnnnnnnnnnnnnnnnnnnnnnnnnnnnnnnnnnnnnnnnnnnnnnnnnnnnnnnnnnnnnnnnnnnnnnnnnnnnnnnnnnnnnnnnnnnnnnnnnnnnnnnnnnnnnnnnnnnnnnnnnnnnnnnnnnnnnnnnnnnnnnnnnnnnnnnnnnnnnnnnnnnnnnnnnnnnnnnnnnnnnnnnnnnnnnnnnnnnnnnnnnnnnnnnnnnnnnnnnnnnnnnnnnnnnnnnnnnnnnnnnnnnnnnnnnnnnnnnnnnnnnnnnnnnnnnnnnnnnnnnnnnnnnnnnnnnnnnnnnnnnnnnnnnnnnnnnnnnnnnnnnnnnnnnnnnnnnnnnnnnnnnnnnnnnnnnnnnnnnnnnnnnnnnnnnnnnnnnnnnnnnnnnnnnnnnnnnnnnnnnnnnnnnnnnnnnnnnnnnnnnnnnnnnnnnnnnnnnnnnnnnnnnnnnnnnnnnnnnnnnnnnnnnnnnnnnnnnnnnnnnnnnnnnnnnnnnnnnnnnnnnnnnnnnnnnnnnnnnnnnnnnnnnnnnnnnnnnnnnnnnnnnnnnnnnnnnnnnnnnnnnnnnnnnnnnnnnnnnnnnnnnnnnnnnnnnnnnnnnnnnnnnnnnnnnnnnnnnnnnnnnnnnnnnnnnnnnnnnnnnnnnnnnnnnnnnnnnnnnnnnnnnnnnnnnnnnnnnnnnnnnnnnnnnnnnnnnnnnnnnnnnnnnnnnnnnnnnnnnnnnnnnnnnnnnnnnnnnnnnnnnnnnnnnnnnnnnnnnnnnnnnnnnnnnnnnnnnnnnnnnnnnnnnnnnnnnnnnnnnnnnnnnnnnnnnnnnnnnnnnnnnnnnnnnnnnnnnnnnnnnnnnnnnnnnnnnnnnnnnnnnnnnnnnnnnnnnnnnnnnnnnnnnnnnnnnnnnnnnnnnnnnnnnnnnnnnnnnnnnnnnnnnnnnnnnnnnnnnnnnnnnnnnnnnnnnnnnnnnnnnnnnnnnnnnnnnnnnnnnnnnnnnnnnnnnnnnnnnnnnnnnnnnnnnnnnnnnnnnnnnnnnnnnnnnnnnnnnnnnnnnnnnnnnnnnnnnnnnnnnnnnnnnnnnnnnnnnnnnnnnnnnnnnnnnnnnnnnnnnnnnnnnnnnnnnnnnnnnnnnnnnnnnnnnnnnnnnnnnnnnnnnnnnnnnnnnnnnnnnnnnnnnnnnnnnnnnnnnnnnnnnnnnnnnnnnnnnnnnnnnnnnnnnnnnnnnnnnnnnnnnnnnnnnnnnnnnnnnnnnnnnnnnnnnnnnnnnnnnnnnnnnnnnnnnnnnnnnnnnnnnnnnnnnnnnnnnnnnnnnnnnnnnnnnnnnnnnnnnnnnnnnnnnnnnnnnnnnnnnnnnnnnnnnnnnnnnnnnnnnnnnnnnnnnnnnnnnnnaattaagcgattatacagttacccaaaacacttgagtgttgagtgattacattcctaagtgaggagtattcagactatgttcatgattgatagacttaacaagtatccttgaaattttcataagtagttcaattgcatttaccaaaatagttctaagattgtatgtgcgaggatatgctaaattattgaatacaaattccattaaaatcaagtttattttattttattgctgaggacagcaatgtttaaatttgggagttatttgataggttgctaatatatggtgaaatttaggatagttttagtcaaaatttagtagaaaatgttagataaatgatagaattaaaccaaaagttcaccactttgtgattattattacttattgttatttttatacatgttaggtacaataaatgaagaaacaagcaataaaaagaagcaacccagaaatacagccagtcgcgcgacggttacggaactgaagatagaatgcgattttcaagataagataagatcaataggcttctatggaattcaaattaaagattaaaagataagataagattaatgggcttctagagttatcaaatctatctataaataaagaagctacagacgacttttggggagcagtaatcaccagaaaacgactttcacatgagcaatatagagaacaaggcagagaacaatcataagaagggagaaacgcattacgcgaagggatttaaggttcataaggaggaagccaagattgagggtttgaatactcttcttctctgtattctttcttattattcacttattgtattgagctagacatatcatgtctagctaattctctgtgattgtggtgaaagccaaaagccaatgtgaactcttgtgttgcttggattgatgattaatgaatattgttatgatttcttccctttatcttgttcttgaatttataaattccattaatagatctgatcaatctgttagaggaacatagggctttaattcgcaatagacatattggggttttagtttctgaaagcggtaaagacagtttgacattacctagacatagggatgaaggattgcaaagttttcatataccaacttaatgcttaatctgaaagggggttactaagacattaggacacttgaataggattaaagggttgaaaagaccgacaaaatctgggttcaaccaatttatgaaggtgtatctttgagaaagataataattgaaattaattatcaattcaatctacattaggagggatcaaaggtgattaggttttcatcacaattattctttattattgcataagttctcataaatcattctcatactttccttttatttaattttgtttttattatttaaatccaaatcacaaaattactctcaaatccaatttcttttatttttattctttccaattttaagataagagttacacttattttagtgcctcaatcctcgtggagacgatactctacttactaaatttattacttgaacgatcggtacacttgccgtgagttacgcattcacactctgtgaacgcaacaactgcctaaacatcatttgcgataaaccagaaattttaggaataatttttttatagacttactcatttcactaactctttgcacaattaaattttataaaaggatctgtttaattaaatattctcattaagtagataaagtctaacaaagtttataaaatattgaaactatttgatacctcattattaaatttaatttaacgtgttatatactttttgaaactataactaaatgttaattatatataactacaacttttcaatttatttataatttagtgcgcacgatcattgagttaatatcaaaatatttaataattatacaaattcattactgtatgtatccattatttaatgtatattactctaatatatatatatatatatatcattcaccttaatttctacaaaaatgcagtgtaaaattatttataatgtacatcatacttataaaaattacatttaatttatacaaattttggataggctattgtcatatctgaattttaaagaagtgttttgactatattacttactatttgtgtaaatttagcatgttagatcaacataaggtttgtttagaagaaaaaaaaatcaaataaatttctgtataaactaaaattaatttatgcatgagttaaaaacatctatgattaatagaaaagctagtatgaaagaacttttataaattagcttgcataagttaattttaacttatgaaaaattttatttcatttattcttcttaaaagttcttaggataagtttatccaaataggttcataatagttagttataattcattgagaaagaagttaaccctttagatatgttgacatggtattgaaagattttcataaattatctatatatcataggttaagagtttatatccatcatgaattagtgataaaatttacatgtattaatcaaatattgttaattttatgttacttaaacttgatatggatattaacactccaataaacttgtagaatagcggtgactagcgacaacctcgatcgggactgactcactagtggatgatgagttttagaccaatccaaaacttttgggtttgtgcgccaatagtaagcacatgcctacatttgaattttcaaaatttgaatgctaatataataagcaacaaataggttgatgttagaaccatcactattatattgtcacttctaaaacctattttactattagtaagttttatcttcccaaccccttcatcgattgatacacgtaacattgttatggttgggtgagaaggcttcgacgtggtgcggtagagaggtggtgttgtggcagagctatagtgtgggcgatgactattgatggtgattttttttgattattttttttttctttctagtttcgttctttgttgtaggttaaaccttggtggatgatgagattgatgggtggtttctctttctttgttgtaggttggaccataatgggtgatggatggaggtttcggttaaggtggctgataagtctgatggtggatgggggttttgatcatggtgagctatggtgggtgactaagtttaggtatggtgaaggagtgggacaaatatcaatgggtttggacatgatgaacaatgacaaggatgaagaacattgttgtgatgataatgtttttcttttctcttctttacttaatgttgatctaagagttaacttaaccaacatacaccattatgtgatgatctctttaaactaacataaacatatgagtgacaatcttctttatgacaaacaagatgttattaattatttgattgaagagaaattcaatctttgtaataattttttaccgtcactaacatgcaaaattattgttgtgtaataaatagataagagtatacttattattttgtagtaggtttcaatttcatcactagattatatttaatttttttatttttttataaacatgttagtataaaatattcattaattttatcgataattaattttcattttattttcttgttaaattttttaaacttgaccaatgacattaattagctaataattgatatcagttaatttatagttagttaaggtcatcaactgagaaaataagtagttgtatggagcttctgaatttaagattgatgaaatattcaattcttttaattcagaaattaactaaaggaaaagtatgtgctttagacatcaactgttaagaattcaatagaattggtgtcgggtagtatgaaattccgctgctgtgaattagtatagaagtggcttttgctagtatgaaattcggctactgagaagtagtagtgtgaaattcggctactgaggattcagtgaagtggcatcaactagtgtaagatttggctaactttcagtgttagctgaattaattgaattttggaaaagtttattcaacgaggataaggtggtcacccgtaattctagaagatttttcgaatttaaattctagaaacaatagtcaagtaaatggattttcaaactacttcaataagtatttggtgtagcttgaaaaatccatttacttaggagcaaattccttctcaatatcaaatcgcatgatcactatttatgaaatcgacgaatcgtgttaattgtagcaagttaatttagtccaaccaaccattcggctaagtttattttgtgacaaaagatatattaataaatgaaatttatcatcttatgttgatttaattgtacagtaattaagctttatttggcaagtacaaagcatttaacttatagtggataagtttgtttagttaaagtaaaagtattggtaggtaaagatgtttatctcgccaaccattataacattttctaatatattacaatagttattttttattatttttctctttactattttaattaaatttcttctctatccttcctctcaaataaaagaaaattgcagtgctaaaccctcaaccccaatatctgtcatttgttaattgcataatagcatctagttgtcgccacttgccacccttgttgtgggatgttgaacaccatatcctaatagcagttttgtcctttattgattagtttaatttggaattacataataaaatctaatcaaagtgatcttagaatttaattttaaatattatactgtctttacttttcgggctaactttttttcatgttcacaatttctatctcatgacatatagaatctaggcattttaaaatatacatttaggatagaaaaaatagtaaagaaactatttttgtcataaaagtaaaatttatataaaaaaattacaagaagatgtcattttttatgatcatattttatttaatgaaaatattttaatataaaatttaaataaaaaataatttttttaattttggagctgacaaatatttgaaataatataaatgtatttataggaatataattattttaacaataaataacatatagtataaaaataaatagaatttatatcataaaatcatataaacaagtcattttatttatttatttgcaagttcaattactaattttgttaaactcttcaaattcaatcaactggcataagttatattttctataagataccattaagcatacttatagattaactcacataaaattattctatcttaattaataatttcaagttttgaatctttaatatatataattgtattaaatattttttaaaaatgtccgtgctttgtannnnnnnnnnnnnnnnnnnnnnnnnnnnnnnnnnnnnnnnnnnnnnnnnnnnnnnnnnnnnnnnnnnnnnnnnnnnnnnnnnnnnnnnnnnnnnnnnnnnnnnnnnnnnnnnnnnnnnnnnnnnnnnnnnnnnnnnnnnnnnnnnnnnnnnnnnnnnnnnnnnnnnnnnnnnnnnnnnnnnnnnnnnnnnnnnnnnnnnnnnnnnnnnnnnnnnnnnnnnnnnnnnnnnnnnnnnnnnnnnnnnnnnnnnnnnnnnnnnnnnnnnnnnnnnnnnnnnnnnnnnnnnnnnnnnnnnnnnnnnnnnnnnnnnnnnnnnnnnnnnnnnnnnnnnnnnnnnnnnnnnnnnnnnnnnnnnnnnnnnnnnnnnnnnnnnnnnnnnnnnnnnnnnnnnnnnnnnnnnnnnnnnnnnnnnnnnnnnnnnnnnnnnnnnnnnnnnnnnnnnnnnnnnnnnnnnnnnnnnnnnnnnnnnnnnnnnnnnnnnnnnnnnnnnnnnnnnnnnnnnnnnnnnnnnnnnnnnnnnnnnnnnnnnnnnnnnnnnnnataaagaatgaattatgtgatatagtgatatctgggaagagctataagcgtataagatataagttatctatcccctatatgttaatttttgcttaacgggggctattatttgtataatgttagtaaatagaatcgtctgtttcattttcgtcttatagttatattgtttccctatgtaaatattctaatctatatttttctagattcctcttaaccattaattctgaaaaataaagtctagctagctagctcaacatatcactttatatatatttatgtccacgtaatttgtgatttcggtataaaaaaaaacatatttaaactagaagaaagagaccgagaacattatatatagattaaaaaatagtatactaaataaaaaatacacatattccgagtcaaatctgtcagcataattaattttttttgaattcgagatattatccgtttaaatatttaattgatcgtgataattttattttatattattcttgtgaatctgtttaaatatttgatcgatcgtgatattttgttttatataattcttttgaaaaatgtctagatgaattgagaagagaaaatatttataaacgatttttaatttgtgatcatcaaaataatatatatatatatatatatatatatatatatatatatatatatataaaaaaaaaaaaaaaaaannnnnnnnnnnnaaggttcttataataaaaataaatgggaagacaactattatgcctcgttgctctgactatccctttcccatgcaggtgtctaaaattaagatacggaacctcactcacaaatgcacatactgcatatcataactacttgcacagtggtatgtaatgtttatccctctatatataacggttgctttccaacccttctccttgaacttgcttagtttgtctcttttttcttctctttctttgacttgttctctgcacgccaaaccctcccaaaaccgttaacttcaactttccactatttttggttaaaaaggctgaaactgaaaccaaaatgggtaggtcaccatgctgtgaaaaagtaggcttgaagaaagggccttggactccagaggaagaccaaaagctcatggcttacattgaagagtttggccacggaagctggcgtgctttgcctgccaaagctggtaactaactaactattgcataatatatagtttttcttttcttttaaccattaacttagtgatccagtattttgaccgagtttatcagtgattcgattatgataatactgctttttttgttatgcaactttttataagatggtgtgtgttaatagtttcttcacttctttggtttttgatatttaggacttcaaagatgtgggaagagctgcaggctaaggtggactaactacctccgaccagacataaaaagaggaaagttcagcttgcaggaggagcaaacaatcattcaactccatgcccttcttgggaacaggtgagcaaatcagtagtagtagaaacttgaaagtggaaacagtaatttattgagtcccacatagaccccataaaccaaaaataactaaggaccgttgctatatacacatcattacatggcccagctagctaggaatgttaactagcatatagcatgattttagtatgatcttatttttgggtatgcaagtttcccccattagaaaagtacttactacaacatgccatttacaattcagcaaaactaattaagaagtactagttctatggatgtttgtgataattttctttcctcatttgaagtttcatctgtatttcttataataaagatctctattaaatgtgatagattaataagataaaactttaaatttggtcaaaaactaatacaagaaattaatacttaccttttaataatcatatattaagtgtaaaataattttatattattaatcaataataattatgataaaagtatatacacataacccgatttctctgatttgaatgatattgtaaaattattttataacttatggatcaacatttaaattttatacgttaggaaacacttgtagataaatatgtgtacattatccatttatcatgtccattgctaatggttgtttgttgaatgttttgagctagatggtcagccataacagctcaacttcccaagagaaccgacaatgaaatcaagaactattggaacacacacttgaagaagaggctaaccagaatggggatagaccccaccacccacaagccaaaaaccgacgcacttggtggctccggtggcggccaaaccaaagactcggcgaacctcagccacatggctcagtgggagagcgcaaggctcgaagccgaagcgagactggttagagaatcaaagttgcaagtccagaacaacctcggctccaacagcacacaacctgcgagacttgttctcaacaaaatcacaacacaacaacaaccctcgctgccaccgtgcctcgatattctcaaagcttggcaaagctcgtggaacaaaccgccacaacaatcaacaacaaaagaaaacagcaccaagataatgcatagcatgtatgcaatgatgctttccactgatgacactctagagtctccaacatctacattgtgtttcccaggaacaacaacaacaacaacaacaatgcttcctgtttccaacaacaacaacaacattggaatactgttcaatgaaaacaacaacaacaacaacaacatgtattctctcgcgacaaccatcgacgatggcgtgttcatgaaagacaacaccgccacaatgttgcatttgcaaatgcaagacgatgatatcatggcggcggtggaagcattcagaacgtacgacgacaacagcagcaacaaatacaataataatattgttgttgttcctcccttactctccaacagtgtcgtccttgaaggattcaacaatgacaataatgataatagtaacgcttctgcgttggtagtttatgactccaacaataacttgagcacggaggaagcagagaacctggcaatcatcaacggggacggaagcctctgcaacgtgaagaacctcgatgagaataataagcattactggaataacatattcaatttggtgaatgatcccttgtctggttcctctgtcttctgaagaagctagcgagttaagttagtatagctgttagctataggaactttaggttaaattatgctaataataatgtctcacaataataattatgtaaccctgcatgataatatattcttgtccaaatatatggattttagctaggtgttaagtgttaaccgttattgagtgtgtaaaagtaaccctccttgatatttaattagctttagcaccatttgttctacctaggatttggattcacccgttttcttgggagtgtcaactttctgaaggcaaaatcaaatatctaattaatcaatgtgctatgtgctctcgattaccatagcaatcattagcatcaacaaaaactgtataatcattgcaatcaacattaactctctctctctctctctctctatatatatatataaatataaataaagagggaaaatcagaggtacgtggctaggtgacatttatatatggaacttatgaagtttggtagaatcttttagtgacctgcgtattggtcttccattatcagcattgcacgtcagtgttcatttatgaacttgaattaatgatgttagctggcggagcaagcatctattttgagtttgatccagtccccactattctgctgctgccgcctgtgaaatttagatttactatttattactttcaaaaagaaaaaaaaaacggaatataatatcagtttatcacttttttttatgaagcacaattgcattctgtaatactatagaattaaagaatacgtcagaagaaattatgcatgctgaggatcccagtcattccaccaaatatcctcctattagactgaatattactagaaacacatgcatacatgtattatttctctttgtttttaattataagatattattaagtaattcacatgtattaaaaaagttaattaatttaattattaacattaaatttatctttaattataagtgattccacttttcatatacgctcgtattttgtacgcgcaacatcttttattctacgatttccttaattagctacgtataatgggatgtctgtcactcacattttctaattttaggtatcaatcgctcaattttatattaaagaaactaaccattacgcgcattttacgtgatgatcgacttgagtaactataagttgaaccgcttataaaaatgtagtaaatgacgtcaagattcctgatctcatcgaagggtgtcaatttgaattgggtttgggatagatgttatataatgggtcaaattatagcagcaggccattgcatgttaagtaagtacatagttcataataataaatcaatggtccctgtcgaattttatatgatctgcaggttattcaatgcaagttggcctactggttcatattatttatttatttaattttttattttgaacataaaaatattaattttaaattaactaaataatgttgaaaaactttaattactttatattaaaagatttaattaaaatgagttaaaattactgtgtgttgcatggtattttggtaaacacgaagaataactgaatactatcatttttttgttggtaggtcaattccatcatttgggtcaaaacaaattaagtcagattaagttttacaggagagttgccaaattgggtggttgagcctaagcttgtcgggtctgagtgtgaaattgcgttaaatcaagttgacttcaattttatttgtactaaaatttaatggcctaagtaagtccgttactgagttagtaagtcaaattgatcctaatttttttaaaaataattttaaacatgtttaatatgtaaatttctaagattagacatggcaacggggcggggcgggagtgggtattgcattccccatccccggccccaaacccgctccccgcccccgtttcctgccgggttttaaaactcatccccatccccgcccctgtttggggtcggtttttcccgccccgccctccctcgctatttgattaaaatttaaaaaataaaaaaaataatataacttttttttattaaaaaatcgaataaaaaagttaattatgtaacaaaaaaataataataacaaacccacatttaaaatataggatcataattttaaaattacaaaacaaaatcaatcaattcaattaaaaaattaaaaaataatatatttttttatttttttaatattatttattatgggacaggggcggggcgggtatcagaaaccccatacctgccctcgccctcgcttttggctaccagggaaaacccgaatccgaacccgaaagattcagtttttctccattaaaatcgggacggatttggacgggtacctacgggttcaagtcctgctgccatgcctatctaagatacacacaaaagaaaagattaaaataaaaatgattaagagttaggccaaatatgttcgatttctttttcggaccattatttgaagagcccgagttggttcaagttacaggctgttagggtcaaaccataatgtggaacttaaattgctagctctaatactaccaagatagtctctaatatattctttataacacatgctctattggttaaaagttactacattaaaaactattaaatcatgagagacacttaatacataaaaggttcgatctcaaataatttatgagttttaataaattttaatcaataaataaataagtatgattaaaaaagtatattataatatgtattgttagcatttataaattaaaatgtattatttaaattttaaatcatgagagactcattaaataaaaaagtactgaaacttacaaaaataaattttaacaaataaaaataatgtgttcgaaagtttgtattagatatcgtattggtaaattccctaagttagttaaaatgtttttatatcaatttgttgacacaacccatacatttaatttggttataacaactaagttcattaattattggagtttgaatcattttgattcactattttattttatttatttcttacttttttaactctgtctgacacgcttattttaaaaacataaatgatatttggtgtatattaacaaggatgtaattaaatgtttgaagtacaatactaaaaaatataggtgtgaaaaaataagggaggggtagaaccaatagtacgtactaactagatagtgaaaattaccatacatgtgtcagtttgagtagaagcaggacttaaatcttttagcacgtggtcttcagttagatcctaagatttatatatataaatggaaaataatattgttataaggagttttcactctaatgtctgattgtatctataaaattagtctcccatatctattgggaagaaaaagtattctacaaactcaaaaactaaagagtgaaaatatcaagtaatttacatgagtagcattatttaaagtcatgcatgattatactgttgaaacagtactgtatactcttaatagcacatcgctcttatatgttaaaccaagcataactttattttaaaaaataaaaataataaggcatgtaggagtacaatattgtgggctcattacattacatgggtcaaatcgagtcaagtgaaattgaaataacattctatatcaatttcgtttacataaccacatgcagttttatttgattattcgaattagtttattaagtttgcccccttttttatatcattaatatcccgtgtttcacatttaactctgttggaagttaacataaataatgtttggtatatattattgtggatataaatgtttgaggtgccataattaaaatataagggtgaaaaagaataacggaagggtagaatccctttatacacgcggttttcattttgatcctcctaatttaacactttttggacacatcttttttttttgttgaattttttaaaaacacaaaaatgtgttaactttgcatcttatgtttttcttttttttattttgtaattttcaataaattttaattaacaataatatattaaaaaagttgattttctctcatgtcagacagcactaattttcatttcactcgtttgtagaactgctccaaatctcatcactagatttttcagcaatacggaagaaatctaggttgtcctattgcccccacccctccaccacctattatgtgtttagtcatacaagtcacaaggtaggacaccataacaaatgagaccaaactagaccaactatatcaaagcatcacgaatgcttgttttaattgtagacatttctaccttaactttttatgatgtttcaagataagatactactatagaaaaagaccaagctagatccaccataaggcagggcaagtgttagggtggtccaatgttacatttgtacagaggtggaatttaataggtgaaggtgaggttgtatatgtgatctagtttggtttgatttgtttattacatattaggcttaaattttttaaaaagttcaacttccaggttctaaatttttttattaggcctaataggtcaacatggtttacatatattatattatatgcctaaaaataataatataaaacacaattattgataataataataattttaaaaatcctatttatacttatagttaatattctaagtgtcatgaatattttagtaaatgacctcaggcttataagaatgattgagtattttggtaattttttacaaaaatctagacaattgtataaaaattctcaaaatttatttctaacattgaagttaatattctaactgcaaaataaagcttctacagcttttgcaattatattttggctaaaaacgatatatagttaatttgatgacaccaagggcattttggtcactttaggctatgattaaaaaatatttaagaataatcttgaatagtagtctataatttgaaagcaatggtgtgtgtcaaaattctcaaattcattatagatttttatatatattttgctgccttttgacttggacacatgaagcagaaaaataaacttttaaaagaattattcatttgattcttaaatgtttcaatttagtcacttaattttcgttttagtctctactcacataagtataagaataatttttaaaaaaaagtattcccgtcatcttggtccattgggtaccaacaaagatgttaccgtaaaaagcacttgagagaaagatgcatgtcaagcattgcatttcacattggtgttttttatccattggcaaagttactaacgactattgatgagaggacttactcatctgaccaaaagtaatttagacattgttttataattaagaacaagctacttgtcagcactcacactttcaacaatcaacttagcagtttgttgtaataactttaatataatacttttttattagttgggctcacacgtattatatatgtgtgtgtgtttaattttaactagaaaattgaaatataatttgcatgtttgtttgacaaactagttaaatatacatgttattataatactaacattgatgataaaaatataataaaaataacaatgattataattaattacagtacgtaatttaattaagaaaatatttcaagatgatcaaatatcaaattataaatttttacaaattaacttaataaaaatatttaaatgtttttatattttaaatgtaaaatatattaaatgtatcatgcagattataagaatgaatgtaaaaatgtatacacaaaaaaattgttaatatttacgtataactagatatagacacttttattttataacttgatatagacacataactaaagcattacccattataaatatttgtgaggtgatggtatccatgaagtctaaattcactactacaaaagcgtctttcaaagacggttctacatcccatacaaagacggttgtatgacagtctttgtatcgagcgtcgtcgaaagtaactactttcaaagacggttataaaattgtctttgtagcctaattttctaagacggttcttagtaaaaccgtcttaaaatatggtcattctgagacaattttaagaagaaccgtcttagaaaggattcttttaaaataaaaaaaaatgaaaaaatcttttctaagacgattcttaggaaaatcgtcttagaatatcttttttaaataaaaaaaattaacgattctatgatggttttctcacaaaaaccatcttagaatatctttttttaaaaaattaattataataataaataatatgtatgtagggaatttaaaaatcaaaaatttaatatttaaaaatgcatcaatatatagtggcctaattaatttattaattcatattgcaactatatataattataataacaaataatatgtatgtagggaatttaaaaatcagaaatttaatatttaaaaatgcatcaatatattaataaaaataaaaatggattatcattgtcacaagaatcagaaaatccaatgctatcaagaaaaagtctcagacgaacctcatcctaccggagaaatggattatcattgtcacaagaataaaaaaaaaaaaactacatatcatccctctatatgcaaaactagatatccattacctgtgcttgttccgccttagatgtcaaaccaagcaacaaaagcaaataaccaccaaacttgtcccacatgtacacccactcagcagtatcaatggcctcttctatgatctacatcgttggttggctcatggcagaatgtcttatgatatcttaatctactaaagaatgaacctacaactaattcttcactaagaaatcataagaaaacaaaatcacaatactaccactaccaaaatataaagagcagggacaaagggagattaaatcatctgcgagtctgtggcaaccataatcatgacaaggtcatggtcacatctacagaatttagaatcctaatcctaatcctaaatccaatacaaccaaaagcaatagccattacatttaaaaccactttttatttactcaattagtctttatatttgtataatttttatgttttaattcttacacctaaaacttattttaattcttacacatacatttcttaacttgtttttatacctacacataaaaatttaatatattttagtaactataattttaaacatggtgaatgtacaattactgcattaatctccaccagtgggcaatttatccaaatgcaccaagggtcaattgagatgcaccaagggtcattttctaaacctcattacaacagagaatcatgcatgggttctagctagctggttagccatcaatgtcatctagtttgggtctatatattttccaacttgtaggtaagatgcacgtttatttaaattgcgatgaattatatctacacttgcctttgggtttcaacactatgaatatttattataagcaactgtttttttttgactaaaatataaacatcgagataaatatgataatttttaaataataattaatatatatcatacggatcttaatatgcactaatttaaatttttagaatcataaagtttattgaacatgtattttgcctataacatgcttgtcatcatgaacaataaccacacataatcatatataacagattattataaattaggattgaaaattaaccagaaacgtggatcttagctgggatgtcgcttaattattaatgcaacatagcttggaataatactcctccttaaactatctttgagcagtatcaattgaaatgcaccaagggtcaacccaaatggatgcttcttttggaaagttctagtgaaagaaaatgactcattagtacatatataccacaataaaaattaataaaaaagatgcaagaatctactgagataaaataaccaaacattactatctatttgggtgcatgaaaatgactcattagtctccaaatcctagtgaagcctgaaaaccattttccaaggggtcagcttttttctctggtcaaaccaagacaaggtagaaatgataaggattgaggcttgaaaaaaaatgaaaaagaccaaaactcacattgtgctctctcacaaggtgacattgctatatcagtcactgccatgaacatcatgtgatatagctatataaattgtggcttcacatattcacaagagaatgacttgtaaagaacaaatcataaccaaaaagtggaagttgtttcgaagtttaccaaccaacttctagaattacaaaggtaagagtccaaattaattgtgtacctctgatcgagtaaaagtatctatgccttgtcatctaaacttagcacatcaagtttgattctgagatatggtaaggcaattgctttagtcaaacctgccaatgcaacaaaactgctggggaataaattaatggcccaacatagaaatcaattatagcatgtcaaccatttgacagtataggtaagaagtctctagatgacattttcctcagtagatttgcattatttcatgtctgatatgaaaacataacaactattcaaaacacaccccaatccacaggcaagagaggtcaatgaaactgtttgccattcccaacaattaaacaatattctttccattaatgtttaagatttcataaaaactaattataataacaggaaggaagcctattgagcagaagatatcattcaacatatgaattattagaaactaaaaccaagctaactagaaagcagagaataagaagtgcaaaaatgggactgagttaaaaaagcaagggacctcttgaacagtgaacttttcatgcaagatgagtgccaaagcaaagctttccccaaaaaggaaataatggcaaaaagtgttgagttccctatcgtaacttctcttgaccatagggtgaaaacgcatgcaccaaactcttgcaatgcctcacatcataatttaacttgttttgatgtttcaagtgctatgagttctgctattccagtgccaacctacaaccacaaaccatacaattcatccacaaggacatggatgatataatagttagttgtaaggaaatgtaagtgaacaattcaaagtgatctgaatatctgatgatgttcaatactctctttttttaaacacctttttactgacaggaaatgattaaactttcctatctccaagaaacattgaaaaaggacacatggtattaacttacctctccagcaccaaggaataagaacctgtgatcagtcaagtctcccccaaccaatttcaaagctccatctagtcctgcaagaatcacttatgttgttccctgaaacaaagtggataggatataagggataattatcggttacaaaattgaaaacaggcattactttacttaagctgaaatttataggataatgtcaaataaatgtatcagtgtaaacaagaggtacctaagctgtatcagtctatccataattttaagtaaggaaatcagtaggatactcacatgacatgtctttataagcaacaaatgcataatgatattggatgagtacgaactatgaagggggttatttccctattttgaagcaccattgcttcatagacacttacaaaacaaaataagaagaacctaaaactaaaaatagatgttctagcaactcacaggaaactgtaaaacaattaaagtttgatagttgaagaaattacatggaaaataattgaagatgttctagcacgctttgatttcatatatattataattaaaaaaaaaaagataatcaaactacatgacaacaatttccatgattgtcatgtatgtatacttaccaaaacataagagtgtaaggaccctcaagcgtggcgctgttggcgccatgagtggcgcggttagcgccaggttatgaagagagaaaactgtgtttgaggtttggcgcagacggcgccaggattggcgcgggtagcgccatacactctggaagctgacgctcagggcgccagggtcacgcgaacggcgccacaggttctggaatatggcgccaagggcgccaggacggcgctggtagtgccattgtctctggattctagcgctgagggcacggagttggaagttggcgctgggggcgccagggtggcgctgatggcgccacagtttctgatatctggcgtgggaagcgcgggcatggcgcggatggcgccacaatggcggtgcagctggcgcgatcagcgcgggaattggcgcgatcagtgcggcaagtcggtgctggccattataaatagaaggctcgcaaattctggagagaaaccactgtttctcttcttccctgagcctctccaccattgttgagggttcccaagctccctaaagccttgatacttcaccaaatcacttcctaaagccttgaatcatgaggaaaaccatgagtgagctaaaatccttcatcctaaaccccttaaaaccttgagctgagagatactttctcagaggagtgtagaactcgaggtaggcaaagagtggcagtgattctcggacactagagctagaggaagtggtccagagatcttccttgccaattctgaggtaagaatcttgagtttctccggttatatgttgatgtgggggttttctatgaatagtgacccaattgagttgaggctagaattagcccagggtcttgtagagaaacttgtttagaactatgtagtgatgaaggattagctttcagaattggatttggtgaactttgattatgggctctatttatgaataagtgacttgtgttaagtcactagtcgatgttaatacgacatgtaaagagccttgttgactgtaatgaggtgcctgagaggcatagtgacgatgtctgatgaatgtcatggaccatccaagttttaattggatattgagtacttgagctgatgtgagctttgagctcaccatatgtgattgatattgagtctgggaatgactctaagccttgattgagctgtgggctcatggtatgtgaactgtatcgagtctgtgcggactcagatgctctaatggagctgaaaggagctttgagctgattgttgtggcttatgttgagtctgtgatgactctaaagccttatgttaagctgtgttggacctagaaaagtctgtgagagcctagtgtgagctgggctgttatgaacctcaggttaaaggacttatgtattatgctagtactggttgcatgatagcattgattgtgacatgagtatacgtgcctggattagggctggacaccgagggtgtcagtggcgggaaccacagatcagggagagagcagcaaagcgaggctttgctaggtaagttcttggtccctggggatgatttcccgcttgtttgtgccacaccacactccgggtggagtgatggtcatattcatgaatacatgaatttggttgttgcatcctcataatgatatgtgtgtgcatctatgcttgagaaatgtattatgcctgtgattagatcttctggccagtagatagatatggacctccctaggagacgggtcgagtgacatcctcctagttggtttgctctagttgagggattctcccaaggatcggtgatcctcaagaccaaggggataggagacaagtctaggacatccttctattctcagatgagataggagacgggtcaacagacatccttctattctcggaggtaccatatatgtgcatccatgctaaggggtagcgcccgatgggatggcacgggtgtgagttccggtctcacactgaggttaggcgttgatgatatccgccgtacatagagcatggtgaatgctcatattgttatgagggccgagtggccgggccgggtggcctatatgattgcgattgcttgaatgtttgtgtcatggagagtgagccagggtggaggagatccctccccggaccctgagcttactgagatgtgtatctcaccccgtgtggggattcatgtttttcaggtgactcttctggtagaagagaacagtcatagggtaggaggcccagtaaaaacattatatgcatggctagggatgacatgaagagagctggatagctcagtttgcttggatgctgttaattgctagttagcgccctgtagagggctgtagggcatgtaatatgtttgtataccctcgtgtgagggaagttattgattttgtagaaccactgatgtggttcaaacactgatgatgtatataacctgttgatgtaatgaaaagacatttcctcctgaatctatattgtgaaatggttttataatctacctatgaatatgttgtgataaactgtatcagcaggggcatgtactttattgatgtgttacttgtgatgattattgatggtgtgtgtgtattggtatgtttgataatccatacataatgtgatcaagaaatacggtctaatcgcttccgcattgttttgaattaacgttttaagcacgattctgatattattaatgataatacactgggtgcacacggggtgttacaaagagcatgatgctttatttcctaaattttaaaatgacccggacatcataattacatgtccatagtcaaacaaggataatgcattttcactaacttatacataatcagcccgagtcatcagtcagtatacaagtccaatccatcatacttctaaagacagtttacagctcagatatatagatcatatagctaatgaatcttcacttttaccttaagaatgtagtcaattaccacactggtctgcttcccttctagtgttgctgcctgcaatgaataacaaaaaagaattcagcttcttcacaattcaatgtgttcaacatttcaatcatgaagattcaactcttccttttccatcttatttctaaacttcatataggcatggatctggttcgatatttgcttccttctatcttgttagtaggtcagtcaacatctctgtaaagtagtatataacaaaattcaaagattagaatttatttaatattatttttacccactttattttttcgttgttaccataattctatccaatcccttgacatctggcagcgaaagctaatgtttctctcactgtcatttctccaaagtgattatcatgttgacttacataagttgatgtcctttgtggcataaacttttcaaggctacatcataagataaactgttgatattgaaaaaataaattagaaagtaaggcacttacccacccatcccatctcttctttgaaataccatccagaccctgtagtgctgcacaaccactattaactttttgtcttgccattaaataaaaaatatcaagtctaagtttaaattaacttatcacaaaatataaaagaaaaacaagataaaatgatagtagataactttgtataacaccaacaactttctttttactaatcttatatttacccttgcacaatgttatttgaacacaagacagtgttgaagcccaagtgctagaacagatattgaagtagagccaatagtcaatgcaataaaagagacctttttcaattacaaattatagttcataagctcaactatgaacgaaatcaactgcttgtaaagagagtaattccacggtttcaaattactaggtgggtgcttaggtagttactatacgtgtaactacattatctctcaagtgatttgagcggtaacacaatattttaactgaatggaaaaaggtaaaaatgtatgctacatgatccacaaatcctcaagtggatcttgttgcagtttaaaatgaggcaacaaacacatcgagttgttccttgctgactaaatgcacataaatgccaaaggatagtctatttttttttagatgtcattctctactttaccttccaaattacattctgctttagggtagtctaattaaagcaaattcacctcaatgttaagcctaaaattagttgaattaaaataaaagaaaatggggaggaggagtaaatagatggatttgcactgcaataatgtcaggctaatctcataactgtgttcaagtctagtgttttcactaagttatttgtaagttcttaaaaataagttattttataagaactttgaaagttagtataatgtcaaatatgtaatgtgaaacttaaacttatgaaataaataataaattaatacaataaaaaaacaagtacaattgtattggtaaccacaacttacgtgcatttgcaaaggagtatagacttgacaacatcctcaaaaagagagggagagtgaaatattctaccaaactcgtcttgtttggcttgtggataaagaccttgaaactcatttactgctttttcatcttcgtcacttatccttagcattcgtgtcacttgttttcgacaaatcaaaattctcaaaataaaatattcacattcctctattcaaattggtactataaaacaaaatagctagtaaaataattgtgcaatttctcgtaaaggtaatatttattatctttttattttgttattatttcttttggatatttaataaatgtaacaatttttataaggatgactttaaaaaaacaaaagtgtagaagtgggggacaaactaacaatattacttttgctagaacaaaaaattatgttccaaccttgtgaagaattagttaaatataaaaggtgaacacaaaaaaggttagttacaatgattattaaagatgaatcaaaagagttcaattgccaatttttttctttatggcattcacacattctacaacaaaacccacctctttgatatagttttatggacttattggcattgcagggggtagcaacaagatctatgggagcattgaagcaaataaatagcaatatgcttaccacaagatctttgatatagtttcatttagctaatagctcaaaattttcccattttagccagattagcacacaacccaaaaataggtgcaatgaatagcaatatgcttaccacaagtttccccctgcttgaggcaggcatggcagcatcatctttcactgctgcaaaagcagtagcagcaagcttcttggcttcatcacttgtactgctctgcagcatgccaagtccattcttgaaagcaccttggccaagggatttagttgccttcagtgccaagcccaaataagacatccagttctctgttcatagttatcaggttgacagaaattaaaatccataacagttaaaagagtttttattttacttttgcttgacaaaatggcttgaagaagagagcaacaacaagatcttacaaatgatgtcttttttgcagtttttttgggagcggaattaggcttgcttgtaaatttgttgagggtcttatgagatactcctttattcatttgttcccacatcattcatcatttttcagtccaaaactcattcaatcagataaaagatcaatattctttggctgcctgcaaattcaatgataaacttcaccacttgtttcctgcatgagctatttaatttgcctcatcaatcatgaaaacataaattaattaaactcgactgtctgctaaacatgaagaacattctttaaggtcctttaaattttcttcagtttgggaacgcctaagaagacaaaaataacataaaattatatagagataaaagaggacaacttcattcattaattttgttgcagcaaacagtagtactacatgttatatctctgcagagcattcatactgacaatgtttcaaatagttcgtgtgcatatcagcgtggcttaaaagaaaaatgttgctcaccagaataaccaatgtttgtagaaccccatttatccaaggttttatgcacaaaagcccaatccatcgtgttgcattttgtgccctaacctcagccatggaggcctcaaaatcaacatagaacaagtactcgaagtgcttcgctgttcccacgttcgcgtcatccacgagcctaatcggacagttcgggtgcggcggcaactccatcttcttagactgatgttgcgcatcatgttcaggccgtagagctctgtcgcgcatgcgctcgtgatggcagcggtgtcgtggaggttctttgtggagacaaactcgatggcgccgacggtggaaaatttgggttcgagggaggagaggagggaaatggtttgggttgaagtatctgaggacaagagggaacagacgtggggtggaaaatttgaaaattagggagagtgcacatgtgttcagcattcacgactttatcacgattttgataaagaccgtctttgaaaagatgtttcaaaatcggttttataagaaccgtcttcaaaaacttgtaattatttacaaaaatgttaccgtgactaaaacgaaatcgatttttaaatagccgtctttaaatgcgcgtcgtaaatttttttagtagtgattatatcaattctactttacttttgtacctcttggctgtgaaagtagtattgtgcatgatattcgaggtgtaatttggtttgattattattagatataaagtgatccaaattaaatataaaataaaggtataatttagtttggattaatttaaatagaatatcaaatcaaaatcaaacaattttttttgatttgatttactgttttttttaatttattatcataatnatattattttaaaaataaaatttattttttattaaattttgtttaaaatttttttattaaaaattattatataatgatattatcagtgtttttttataagataatagttatttgtacaccatgtatttaactatattttttaatatatttatatattctttactaaaatatgaaaataaaatatgtatcttaattataaagaaaaggagatataattaaagaagaggagatgtaacaaattattcaatattttattataatatacaattttgataacaagattagaaaacaaaactaaacgtaaaaaattatgtgattttttaaaatatttttagatcgatttcacagattataaattgtttgggtcacttttcaacatctctagtattatgcatttataaatttataataaattttaagcataaatataagtttagccaaatgtaaggttacactttttttaatgttgtttctgtaattttttttttcatttttagtttatgtaaattttaattttttaattttggttttcttttgtttttagtccatgtaagtttgagttttccaattttgatccaaaagttctaacttgtaaagattaaaaatgaaaaaaaaaaattatagaaatcaaaattgaaaaaatgtaaatctacgtagactacaaataaacaattttttcacaagaactaaaattaagaaaaaaaaacaaatttataaagactaaattcatatttaaatttaaattttaatattattgacactcagaagttttcgctctgcctctgggtgtgtcgtgaggtgagtgacgaagacgacgcgggaggatggggaatgaagggaagtagaataggaatataaagaagaacaaaaataaatgaggggggtagaaacgaaaaaagaggttgtgaatatcatttttttggttttctattctggtttgagctagactttaatttgacccaaagtctgatcttgcacctccactcagggcttaacttctcacaccaggcaaatttcccatacacccagcatttttcataaatgacaataatgtcctcagtgatttttaacatacaccaacctcaccttttcgccattcttcttcttttttcggtggttttcttctcctgcgtgttgttgttgggtgttgggtgcgtcttgcattgttgagctggttgtggaggtcgtggctagtgttggtggaggttgcgttggccggttcgccatcggaggtaagctctgcaactcaagcactgacggaggaagctgacggattggcaatccgtatggaccttacagattgccaatccgtattgcttttacggattgccaatctgtatggagcttatggattgccaatccatatggaccttacggattgccaatccgtatgagcttctgtctcaggatattttgaatgttttctgacattttgttgtttatagggtttaaaatgtaggaaacttttattttatgtattcagggtttagaatgagcttaatgtattgtcattgaattagaaggttaattgaagttttgtataagattattatgcatatagtttgttaatgatgatttacgttgtatttatttagtaagatggacaacgatagttgggtgtatgataatatgatggctgaagaaacttatatggatgaagacaatggaggtgaatcgtttgcatttgaaaataacaagttttcgattgattgttctgaagccttcaatacctcaaaggtatttattctattccatttgatagaagctagtaaatgagttatgtaaggatattaaagatgtattattcatttgtgtaggtttttaattctcgtgaggaagtattggaatgggctcgtggtgttgcatataacattggatttgtagttgtgataatgaggtctgacacagcaactgggaaaaggggaagaacttcatttcttttgataggttgtgaacggagtggaaaatatagaccatttaagaaagatttagtacggacaaccactggcaccagaaagtgtggttgtccttttaaacccaaaccgatgatgtaatccaatatttgttaaatcgatgcatggtttgatacacaaacaaaaatagtgttgttaagcttcaaattttaaacaaatgtatatcatctagcatactgtgtacaacaaatataatgtcaaagtgaaacaacaaatcaaatgtcaaagtcaataatcctaatgaccagggtgtccactgccacgacgtctagaacgaatgtaaactaatctatcatcagtgacacctcgggctaatctgatacactcatcagtaatattgtacgcctcagtgccagcgatgaccatgcgaagatctaccatgcgttgcaacttctccacaatcctttgacacgtgctctacatagcaaaagaaaaacaattgttaaaacataaggcttcatggaaaccaagtaagaccaaaatgtatatagatttactttaccactgcatgtccaggcagaacatcaggtaagtcatcaataggtgcaacatctggaactgctgggggtataggcaccgattggtgcgctgctggagtacgcaaacgatgttccccaggctgaggagggctcatgaatgggtgagaaatggtatagaaccactccatgtactgtgggtcacactatcctggagtagtggccatgtctccagtgtcaaccaggtggtcagaaaaatgactccacctgtcatcaacctcttctgcggatgaggggtaggggcagctatcaaactgaggtatgcactgtataaacccaaattgtctcagcaccctctccggcatgtatctaacaatgtagggcccccatctgatatggcctgagaacagggcaacgtcttcagcctgacggaatacacggtggtcagcatatggcatccaagtaacaccatcagtcgtcaacctatctagtcttcgtcgataggttgcgataggtaatgccttccctgccttccaacggcatgcccggggttggctctcaatgtactcctcctctgcaatcgtgctagccaatccaggaaagtgctcgtatacccaacactgcattaacaaagtacattaacaaaccaaccatgaaattaggttaaacaacacacacaacttaggaaaattaacagtaatacctgtaacaaagtgatgtaaccagctaggtgcttttcgtggtgctgacatgcgtagttaaggttattgtacatgtgctccagtgcagacgcgccccaactgaatcgaccagcctcatggagatcacgaaacgccttcaagaataccacaccaatatgagtggcactcttgttggcaaatatcgtgcaaccaatcaaatggagcaaatatgctctggctgcgacggtccactccatttgcgtacacttcgtggcatacagctgttgtaaccatgaaagacgagcatatgcaccatggcattgtttcttctctgcttctacctctgcgggtgtcacctcaagcaactcaaccaacagctcaactgcctcgtccacatccaacacttcatatgtcatgaacgcacccttcactggtagatgtagcaatgctgacacatcgtcaagcgtgatcgtcagttctccaactggcaaatggaaactactagtttccttatgccatctctccacaaaagctgacaatagaccccggtcacctgtctccaatgaacattggatgagtggacctaaccccgtccccacaaccaagccttcaatctcaggcgcaggggccccaaatttctgcaccttccttccatgtgatgtaagtttcaactcaggccgttcctgcacacacaagttacatattaggtacaaagagatttgccactagtttaactgctcatatggaattatatttcaatgtaatcatacctctcccatccaaaccttggcggcaacatgatctgcgtaaagtgacaacattgaggtgtcatgcgggccaccagggaatccctccatgtcatcatccatggttccctcgacatgaccttcaactcttccctcatcaggggaaccaatgtgacccatgtccataacatggtcctcagcctcttcatcaacaggatcaatacggattccgcgttgtcttcttgcggatgctgtcgccctcctccgtgtaaggggttcttcttcagtggcttctctggcttctctagccaaagaacggcgtaatcctatcgttttaaccataatctgaaattcaaacaaaatacttacatcacaacttcatatcaattcatacaaatgaacaaaacaacttgcaagcatagccttgtggatcaatatcaaatgcatcaaagctcaactaaaacattgatcaactaaatcaaagctcaactactcaatgataatgagttcgatctccatatacacaatcaagtaaatcaacacaatgtctaaaatatacacaatcaactaccaattttcacccgtacactagtcatcatattgggttcaatactagccttatataagcaccacacaaacaatggtatccaatcaacatgaggttataaaacacatcaatgctcaactaaatcaacactcaacacataagtataatataatgagttcgatctacacaatcaactaaatcaacacattgtttaaaatatacacaatcaactaccaattttcacccgtacactagtcatgatattgggttcgatacaagccttatatatggaccacacaaacaagggtatccaatcaacatcaggttataaaacacatcaatgcacaactaaatcaaaaacataagtataataggtacataagtaaatcaatacatgagtttataagacacatcaatgctcaaaatcaaacacatttcagggctcacaggatccatacagccaactgaatcaacatcatttttagaaaatatttttttaatttaaaaaatcccaaaaaacacatacggatcagaaatccgcaagttccatacggattggcaatccataaggtccatacagattggcaatccgtgaggtacatacggattgtcaatccgtatgttcttcaccgtttccaattcctctttacggattgcagatccatgccctacggattccaattctgcttacggattacaaaaaaaccacagccaatggacttacctctgtcgcgcaaccacggaagcaatgcaggacggcggagctagctcttcttccggcgacggcgatggaaactcctacggcagcgacaacgacggaatgcgtgacaacctcacggatttctcagactcgggagcacctcagcagatgaatggtgtatgggaaatttttaaaatttctcaattaaacctattttagcaagggtatttctgccatttcactatttgatgctgggtgtatgggaatatttactggtgtaggaagtcaatcccctccactcagtaggaccgagcccacttttgcctcgttttccttatttggatatcaatctttagatgcacataatagttaaatttaggataaataaataataaataaggacaataataaaattgtgagagttaacttagaattaactatttaattttgacaataatagataataacaaggtttataaaaaaataacttacattttaaagaaggaaaaatataaagcttttagtaataactatattgcatgcacttctgatagttattataaaaaataaatgataattgatacaattaaatttgagggattaaaattataattttgtgataattgagggacataaatgaacaattggaacatgaaaatttaaaattgcacaatttcaatttttgtggaaccaaaaatataattaagtctattaaaaatataataaggactttaaatcttttgaatcttggatattttattaaggtccatttttgtttgtgttaatgtccacttttagaccttactatgaatatctatttttttcctgaaaacataggactaacgccttaaagaaaaactaaaaaaaacacattaagatattgctatcagcactcaatgagttcgaaacaaaaagacgctttcacatatacatgtatttaaagagttccagaacaaagtaagcaaagtgaaggagaatgaacaaggtgtagaaataaagtactaacatagcaccccaaaaaaatggagtacctacaatatttgcaattggttcttattctactttgatatgattttttgaatctccttcatggaaatgcaaatttgattctatgtcatccaattggttgcatccgctctcattgtatgaatgagacataataataaatattaattgttaatttattaattttttttataatagaagaaataaaattggtgacattttccttcatcttttctttcttaaccaatgaactaattttatataacctgccctttcaatttcagtatttaatttatgggttcatatgaacttcttttacgataacaatattggttttgacactgtaatttttgctttatttcattccttttaaagagatttaaattggtaatgtttcctattaaatttaaatttggtgggaaccaattttttttattgaaaatttcaattttttaagttagaaatttgtgattgaaaaatcattttgacactttaagttccttccatgtaacaccccgtgtgcacccggtgtattaacattattatttatcagaatagcgcttaaacaagataattaaaacctttttaaaacatagcggaagcataaaaccaaaccatnnnnnnnnnnnnnnnnnnnnnnnnnnnnnnnnnnnnnnnnnnnnnnnnnnnnnnnnnnnnnnnnnnnnnnnnnnnnnnnnnnnnnnnnnnnnnnnnnnnnnnnnnnnnnnnnnnnnnnnnnnnnnnnnnnnnnnnnnnnnnnnnnnnnnnnnnnnnnnnnnnnnnnnnnnnnnnnnnnnnnnnnnnnnnnnnnnnnnnnnnnnnnnnnnnnnnnnnnnnnnnnnnnnnnnnnnnnnnnnnnnnnnnnnnnnnnnnnnnnnnnnnnnnnnnnnnnnnnnnnnnnnnnnnnnnnnnnnnnnnnnnnnnnnnnnnnnnnnnnnnnnnnnnnnnnnnnnnnnnnnnnnnnnnnnnnnnnnnnnnnnnnnnnnnnnnnnnnnnnnnnnnnnnnnnnnnnnnnnnnnnnnnnnnnnnnnnnnnnnnnnnnnnnnnnnnnnnnnnnnnnnnnnnnnnnnnnnnnnnnnnnnnnnnnnnnnnnnnnnnnnnnnnnnnnnnnnnnnnnnnnnnnnnnnnnnnnnnnnnnnnnnnnnnnnnnnnnnnnnnnnnnnnnnnnnnnnnnnnnnnnnnnnnnnnnnnnncataaattctgatttatatgtgatagatttaataatagtgtaaagtaaacacataattaaaataaaatataacaatttacttttttttactgcatgctttattttatttaatccgcacactaaatgtttcttacaataaatactaatataattaataatattaatataagattgcaattttcatattctaattctaacactttgctacatgagcctaccaaaaaatactaatacttatctcccactccacattaaatatatcattttcacacacacacacatatatatatatatatatatataaacataacaagaccttaaactactaataagagataaactattttaattaaaaaatgaaaaaactaaaagtacatgtttgtaaaaatatggaaaagaaaattatattttaaccaaattatttttattagtattcttgataaagaagtgccgagtcaagggttttaggggtttttgaggttttaagcagcatcagcatctattcttcttctttcttcgcgtatcttccgacgcagccaccctctttcagcacttcatcccaacaatgtccacgcttccgaagcaccaacccgaagcgaaaccccaagatctccctccggatcaaccagcttcggcgacctccgatgcaaaacccgaagatctccctccgaaccagccaggttcggagtctcccgatgccaaagcagagggggaagaagaggaggaagaagaagaaggggagtgcgggttctgcctcttcatgaagggtggtgggtgcagagacgagttcatagggtgggagaattgcgtccaggaggccgaaaacaacaacgaggacctcctcgagaagtgcgcccaggtaaccgccgcgctcaagcgctgtatggacgcccactccgactactacgagcccatcctccgcgccgagaagctggccgaggaacaggccatcgtcgaattggagaaggagaagcagaatcaacaacaacctccccaagaccaaaagtgagaaccctattttttttttttatcactttgactggctcaagttttttgtcacaatatttggtattggaaaagagagtgttttcttaattggataattggattcacagctctgtctctgttcaattgatttaatttgccatatggatgtgttatatcagttgcttattaccgtctaccaaggggttctagctcagttaggtgagtagtgtgtctgacttattgcaaatttcgtagtacctgagttcaattcttacggatcgaagacaaaagttgctgttttactgtctagttacttgtttatgtcatagtaacaagactgcaagagtgtgtgatcaaggttttaaattgcagttttgtcggtggttttcctgtggtccttgatattgtgggaaattgtggttgtggtggtgactccagaaaccttgatgttgtgactgtttttaaaattgtgtttgatctatgcatgtctaactctaggatagaaaaatattcagttactgaatatgatctatgctagtattgaataagaaatgagacttagcttgatttgcggaacttaagtgctagaaagaaatagtagtgaataagaaatgagaaatagcttgacttcatgattctcaattaggagttagtttggataaattgtaagagatgaaaatagagaggaaaatgaatcaatattttttttctccacaagttataaatagatcatgtgtcttagcaaggttttaaattgcggttgtgattttgttgcaatccttgatgttgtgggaaattgcagacaattgtgatgtggtcacttcaaaaatcttgacattgcagttgaaatcacagtcgcacgcagatcgtgttttaaaatattgtatcttagctttttgagatggaagatgagagagctcttaaaaaggttgagacttgagatggatattaacttaaagaaaaaatgatttattttatcgtcttatattcttttctaacaagtacttcttaggaagtttatctagctcaactcatttaacttctccaaagtagaggtgtattagttgattttaatgtatgaaagaagtttgattaattttacttatttttttcttacaagtgttttccgataggtttgtccaactagctgctatattcagatgctgtttcttgtagattctgcaagttgaaatctctttttttctttttcttttccttcaatggcagcatttgtactttactctgtatttcagttatattttcatttccgtttgaaataaataaatatacggtactgcttgtgttaatgccagtaacatgtagcctgtttgttttaccccaaaaatcatcttatgggccaaataacatggtttatacagtactgttgcaaaaattgagtttgtgcaaccaattccgtagtacaattgatttgaacttttgaaggaaagtaaaatcttttagtttttttttttttttttttnnnnnnnnnnnnnnnnnnnnnnnnnnnnnnnnnnnnnnnnnnnnnnnnnnnnnatggcagcatttgtactttactctgtatttcagttatattttcatttccgtttgaaataaattaatatacggtactgcttgtgttaatgccagtaatatgtagcctgtttgttttaccccaaaaatcatcttatggaccaaataacatggtttatacagtactgttgcaaaaattgagtttgtgcaaccaattctgtagtagaattgatttgaacttttgaaggaaagtaaaatcttttagtttttttttgttgagtataattcttaaaacatgcctatattttcactttaaagttgatttacttcatcctccaaataaaatatttttaaattcaatttttaacatacgattctcaaatgctaataaaattttgtaattgaaatctattgtttcaatgttaatgcctctaaaatgttaacaatatttagctatccaataatccataagtcagtggaagttttgcaatagccattcacatagtattggtaggaattttgaggatgaaaatattatgtttgaggtactgaccttaaaagtggatgaaatatgaagtgttgaagcttggatatttgaattacggatcttctatagtgaaattttgaagtattaaagcaatgtatagatgctcattcttattactgcaaattcattctcaggcccgagaaggttgttgaggaagtagccatcattgaattggagaaggaaaagcaaaatttgccaccaaacgagtcccaacccccttctccttctagtcaagaccaaaagtgagaccccatttcattgtccttttttgcttctcttaatccactgtcatactcatacctgtactgtcaatgcaaatatattacagttatttttgtcacaataatcgtgactcatttttattgtcacaataattggaatgaccagtattttctttgattcgcagctctatctccgtttgattaatgatttttaatttgtgatatggttgtgttgtattggtcgctattttactgtctagttactgattagtcattgatggcatagtcacaatagtgtgatctatgcatgtctagttctgtttagtttgatccagtctagtatagcaaatattcagttactgaatgtgacactgggtttcctgcttggtgtttctgttataactatattatggtgggaatgctttactgttgatttgcagaatttaaggcagctagtattgaaaacaaatgagaaatagcttgacttccaaattctcaattaagagctactttggatattttttttggcaaatagttataaaagaagaaaacaaaaaggtaaaatgaatcaattctttttaacaaggtataaataacttatgtatcttagcaatgtttcttatgtatcttagcaatgttttaaattgaggtcacttttgtcacaatcctttatgttgtgggaaattgtggacaaatgtggacgctataactctaaaaatattgatgttctgccgaaatcgtaactgtggaccatttttataaaagttgtatctgagtttgttgagaagatgagagagcttttaaaatcgttacttaaagaaaaaatctgattttttccccttaatttctattcctttaactactttttaagttcatctgtctcaactcattcaccttcttcaaaagtagaggtatataattatgaattgattctagtatacggaaggagtttgatttatttcaatgtctaaaatcactactactaaaatctaagccaaacggactcttagctatcttatgatgttactccgtaaaggttgttttgcaatagtcactgacataatattgacgttttaaggatcagtatataaagtggatgaactatgaagtgttctagcgtgcatatttgaattactgatttttttaggtatttggtgaaaaagaaatttttttcatgtttggaaatcatgtttttaaaaaaattaataatatataattgtttatccattgagaatttaaagataaattttctataaattaaaggtttatatatatttttatcgattattttaattatttatcacattatataatttaacaaataataacatgatatttttaatgtaataaaagaaaattttcatgaaaaattgattaaaaatcatttttgtaaaacatcattttctaagaattttttttttttaaatacatattaaacataaaacatgataaattaagttggaaaacttatgattcccaaaaaataaataaaaaaatcttctatcaaacactcttttagtgacatttgtcatccttctgtttatcttctctgtaatgccgagactttatttgagatgcgggtatcattagaagcgctcgaaataacaagtattgaaatttgaattttcaaaacctggatatttttggattaaacagaaagcaaaaaagaatgactatgacactatatcaccctattatttctcaaaaaaatatttctattatttctccgtaatgcatatagtgtgcgtacgccggaaaataaaggggaggggagcagctgttaatacaaataacttgtttgattcagaaaaaagaaaaatacacaaatcattctatatacttgaacttaataattttatgagtaaatttcacaaatcatttcctaatttttagttacacatagtttttttttctaatttaaagagtttttttttttaaaaatattaaataaggatctcaaacatgccaactagttaaatcaaagaaattttttatgcttcacttcattgttcgattgggttttatatttctaacctaagccttagtttgattgtgaggaaaaaattactattcagaaatttttaaaaagtaacgtggaacccacatctctctctctctctcttttaattttaatatttcttcttaatttttttttctccttttctttttcacactatcaaacacactaccactctggattcaaatataaaaaaatggattaattaagtttttagtctcttaacttattcaaattctaatttttaattacttaaaatttgtttgacaacttttaattctcggttaattttctgtgaacatttttagttcctcaaaagaatttttcctatttttagtctttcatttatttttattatttaaaattaattcaaaatatataatataatagagcctaaaaatggacaaaataagattttctgtttcctttccttttggagccaagggaccattaccctctctttccttgttagtggaggatttcacattctgaacatcatcaacagaagaattttgcacagaattcgcatggccattacatgaaagcctctctgcattagcattagtgcataaatgttctttggaaagccctcgggtcttccagggaaggctttttcattccctattggaggagtgttctgaattacgtcttcatcttccaaccattctgaagataaattcctcatgatacttgctttacaacttctacttgggctcaacttcaaggttctagaactacttgtactgtttcctatcatgcacacaaaaatttattttggagagggaagaacaaaatcttggtgcatatggttcaatcttttgtcttcctttgacagagaataactcaaatctactactttttcattgtctctattatcaactacaaccaatcctaagatagctgtgtttgcattaggagatgatgcattagaatcagtgtatgtatttgatcttaaatttgctgggtttgagtgtttatgcgtgcttatagttacgtcttctaactcaatgcacctaacttccttacaattgtcctcttcatgctgatcttcaatgcttttctgatccaaatcatttggtggagcatcagtccttttgactgtcaaccctgggggataacttctgaccaaaagattcttttcaaggtcagggagttggaataagttatcatcagaactaaaattatgtccatatgaatattgagatgcatcaaaagacctgacactctcttcaccatcaagacttaatacatttggctcttctctttaattttcaaagttccatgaatttctcatatttaaatttggatattgaggatccatactttcctggagatttgacaggaaaattggttagatttttttaaaagaaggcatatcagttacaactttcaatgcttaaaggcggacaaatatactcatcagttctattctagccacatcttttccatgcactagcttggagcatgtcactaattcgagaacaactttcatattaagagagttcatatttataaatcacaaccaacaagaaacacatgctgatcatagtagggaagcttcaattcaatgtcctcattcctttgagctatatattgaatgttcggttactatatataaaaagcacatttgttgaagttgtcacctcaatatgaaattaaaaatgaaagaaaaggaaaaaaaatggttgagtagtagaagtttaagactttcaaggaagggtattaaaatgagaactcccttgccctaagcttacgttttcttctagttgttgaaggccacaccacatgtgttgttgacaacaacgaaacatttgaggttaagataattgaagtgacaattgaagctttcttgagcttcttattaatatgaagcagctttgtggcactgccaccgagcctgcaatttttcaagaatttaaatattgaatactgatgactcttatcgatgctgcttgttattgcaccgccaccgagctttgtggcacccaataaatcttgatgctcaggaaccatataatccttgttttagtcttaaaattggtcagactggtactgtacaggcacatttatgacagtaaaataatgaattaacaaagatttcttatttttggcagaagccaatgccatgagcttaagtcatacctcgccagcatactgagaaatagtgaaatctgttcgagacaattttggcttaacaaaacgcttgtgattcttaaatgtttgataaagcttgtttgaaaatgtttcgtctgtagactttggaaacatgctgcaagacaagaggaggtggaagttagtgttagtaataattctgtttttaagtctgtttttaagcattttttactacctgaggttattgtatataaatgcatcattgcatcaataacaataatcaagttctattcatactcttttctctctatctcaagtttattaattcccttcaaaaaatattgaatgttgaagtgtgatggagtgaaacacaaagttgtgtaggtgaaatcagtttaacagtggtatcatagagcttaggtcctatcaagaagggatcttgctgcaataatcatggcttccaatggtcattttccagcaaaccttcctgtcctcacaggaaagaactatagcagatggcatgttcagatgaacgctgtgtttggtttccaagatttgttggagatagttgaaaaagacattgaagaagaaacctctgatgcaaagacagaaaacaaggaattaaagaagaaagattgcaaagccttggtaattcttcatcaatgtgtggatgattctcactttgagaaaattgcaagagcaagttctgcaaaacaagcttgggacatactgaacaaagcatatgctggagcagaaaaggtcaagaaggtccgattgcaaacacttcgaaggcaatttgagatgttacaaatggaggagaatgaaaggataggagactacctcaacagaatgcagattcttgtaaattccatgaagaattgtggtgagaaaatcactgatttgatgataattgaaaaaaattctcagaaccttgaatccaaaattcgatcacatggtggttgcaattgaagaatcaaaggatcttgagatcatgtcagtagatgaattgcaaaattctcttgaagcccatgaacatagacttcaagaaagggcagctgacaaagcttctgaacaagcacttcaagttcagaacaatttaagaaatgtttcaacagaaagcaatagaggcatgagaggtagaggaaaattcaagatttcaagaggaagaggtggaaactactctaaagaagggtgtaaatctcaatctgatcaaaagaatggtggttcaactaagaagagaggaggtttctctggatcaagaggtagaggcaagaaaaactgggacaaaaggaacatagattgttactgctgtggtaagaagggatattactcaattgagtgttggtatagagacaaggaccaagatgatgaggctcagcttgcagcagaaggagactcagatgctgaaccagttttgctgatggttacaacaaaatccagtggagagaatgatgatcactagtaccttgacacagggtgttctactcatatgacaggacacaaagactggtttatcagtcttgatgaatcaatgaagaacaaagtgaggtttgctgattgaaggactctaaccactggaggagttggtagtgtgatgatcaaaagaaaggatggcaaagaatcttgcatagaagaagtgctttatgttcctggttttgagtgcaatttactaagtcttggttagcttgcacaaaagggctaccaaatgactatgttagacaaaaggatgagagtctatgacaagcagaaaagactgatattgaaggctccactatccagaaacaggactttcaaagtaggcatcaatgtgttggaaagcaactgcttacttacaaccacaagaaaaactgaatggttatggcattacagacttggtcatctgaatttcaaggatctaagtcatatgcatgagatggtgagaggaattcctcaactgaaatcaactactgaaaaatgcaaggattgcttagaaggcaagcaaacaagaaaaccattcaaaagctttgttcctgtaaaatcaaagcagaaattggagattatctactctgatgtgtgtgggccaatacaaacaaaatcacttggtggaagcaggtatttcataacctttgttgatgatttgagtagaaaaacatggatttacacgattaaaagaaaaagtgaggtgtttagtattttcaagaagtataaggctgctgttgaaaaacaatgtggaaatcatattaaaaccttgagaactgatggaggtggagaatacacctcaagggaatttgttgagttctgtgaagaagcaggtataacacacgaatttacacctccctacactcctcagcataatggtgctgctgagagaagaaacataaccatatgaatatggtcaggtgcatgctgaaattcaaaaatctgacacacacactatggagtgaagttgcttctacagcagtttatatacttaacaggtgccctaccagcaggttaaagaataaaacaccagaagaagcttggtccaacaccaaacttgacataacccatctcagaatttttggttctatgtgctatagacatgtacctgatcaactcaggcagaaattggatgacaaggctgagcagatggtttttcttggatatcactccactggaggctacaggctttatgatccaagaaacaatcaagtagtaataagaagggatgttgcatttgatgaattaaaaggttatgaatggaaagaagattcagcaaataaaactgttaaaattcaaatcactgctagtatctctagtgatatgagtagtgaagatgatgctgctgagatccctgcagatggaagtgatacaagaaaatctcagagaatcaagcaaactccacagatattgaaaggctttgaaatatactctgaccagcaaataactgaagaaggtgagcttgttcatcttgcactgtatgctggaattgaacctgtcagttgtgaagaagccttacaaaatcctaaatgggttactgcaatggaggaagaattaaattccattgaaaagaatgaaacctgggagctggtgacattgcctaaggagaagaggccaattgttgtaaaatgggtgtacaagcttaaaaagaatcctagtggtgaagtgatcaagcacaaggctagacttgtgactaaaggtttcttgcagaaagagggtattgactatggagaaatctttgctcctattgcaaggattgaaacagtaagggttgtagctgccattgcctgtttgaaaggctggtccatgtaccaacttgatgtaaaattagcattcttaaatggaccacttgaagaagaggtctatgttgatcaaccaccaagattcaaggttactggtcatgaatctaaggtttacagattaaagaaggctttgtatggattgaaacaagctcctcgagcttggaatatgaagattgatagtgtgttgattggaattggttttgtcaaatgcccctcagaacatggagtttatgtgaaacacaaatttctagatgagctaacaattttgtgtttttatgttgatgacttacttttgactggaagtaaagaaaaagagatagaagttgtgaagaagttgctaatgaaggagttcgaaatgacagacttgggactcttgtcatactttcttggcatagagttcaaggaaactgaagttggaatcattatgcatcaatcaaagtatgctggagatattttgaagaagttcaagatggaaaaatgtaatgcagcagctactccagcagaagcaagcttgtcattgagtttgaaagatgtgggagaattggttgatgctacaattttcaggcagatggttggctcattaagatactcgtgcaatacaagacctgatttggcttatagtgttgggattattagcagattcatgaaggctcctaagacacctcatttgatggctgctaaaagaatcctaagatacataaaaggcacaattcaccttggagttttgcttccctttggccaaggcaacactgaaactgagttagtaggttatactgactcggattggaggagagacaatgatgacataaagagcacaactgcatatcttttcaagtatggagaggcaccaatctcttggtgctcaaggaaggaggatcctgtagcattgtcaacttgtgaagctaaatatatagcagcttctatgggagcttgtcagggaatgtggttgagaaaactgctaaaggaaatgaagattctgaagaggagacctgtgacactgcaaattgacaacaaatctgcaataaacttggctaagcatcctattaatcatggaaacagcaaacatatagaaaccagatatcacttcatcagggacaaagtgagcaaaggcaagatcaagttgatgtactgcagatcagaagataatcttgcaggtttgatgactaagcctctcagaaaggctaaatttgaagaactcagagataagctgttgtgcaaagctgagtagaaatcagaattatgggggggtgttagtaataattctgtttttaagtctgtttttaagcattttttactacctgaggttattgtatataaatgcatcattgcatcaataacaataatcaagttctattcatactcttttctctctatctcaagtttattaattcccttcaagaaatattgaatgttgaagtgtgattgagtgaaacacaaagttggttaggtgaaatcaatttaacagttagaatgaaggagtaaatcaatattcactctttttaagcccccagtttttcccaatccaagatgaaaaacatgctgttaatcaaattatccactttttttaagtccatcagaatgacataaatcttgtaaaccatacatacatgaaaaattccaagccaagaaaatgtacaagttataaatgaacttactcccacagagcttagtcttgatgtcaaacatatcttccaatttcccgagtagatcctcatatccatcaaattgtgttaaatccacagccctcccaatagccattccttgcatgtgaacctagcaaatattaaattacatcataaatgacctaagtgctctatgcaggcacaatgaagagaaaattctaaaccaccttatcaatactacctttgtatagctccttatttgcttgccttgtgactccttgggagactgcagccatttctagtgttgtgtctcttctctacaactcttacggcactggaaagatgattatgtagaaaaacaaaatgggcagcagaataacaaagaaattttgtacaaccaaccgagcaaacccaccttgcaaagaagaatcgagcattgtagaaggtagaatgagaggtcgtgccctcttgtttctttgggttggctgcaagtttgcaggagtggtagacacaagtgataacaaacatactacaatgttaaaaactttccaaagtgtaccaaagcataaacaagaagttaagcaaaggtcaaccttattgcaatttggtataagttcttgtaatgcatgcatcttctcattgatcctgtgtcttcgtctctacataaataaatcccaaaattttattaccatatacattagataaggtagaaacaatatacttaaccacacacttgataacttgataaggagcatttgttgtaatttaataaacacaacactaattcttgttcaccctttcagatagattatgccttcggctgaaggaattttcttggctccatttcatcgtgccgaaacttccttgttgtcaccaactgattcttccttaatatcctaaaaaaaaggttacactataaaacaaataagaaaacaatttaacataaaagacatggtaagtcttaagacactaacttcactttggctctcaaagtccttagtgtctatactttttcgcttcaaattttgatttggatcctccgaacccctctctggactatttctagaggaaacagaggaagagaccacagctggctccactcttttttcaacaactattatctaagtgaaaattttcttttaatagagtgttgttacttcgatgtgtcccataaattgagttaaaggccaaccatctttagcagagtacaaataattctcatacttgaattagtgcaagcgcatatcaacaatagatggaacccttcaattttatttaagcaatgatttttaatccattattaaagaagttcttgtgatacaagtaaataagtattaatatagagttttaatatagagtatataataatcaaatttaatatacatgatgagagaaattaaactcttacttcgttagcatccaactggtttttcaacagattataaataatatcgtatttatgctttctcaaatggagagagaaccttcgggccgaattctagattagttagggtcgttttagtggcagacacaagaattttattaaaaggaggtgacataaaaaaaactatatcataaataaaagtactccgaagacaatacaaacctaatatataaaaaatttaaaaaaatctattatagaaattaagatcacttcacttgactcttactctacgtgttttcatattgttaaaatcatctataattgaatctatgctaaaattcaaaacaatttctttttcaatgtatgtaatcaaagaatcatcaagaaacaggtcttccattctatttcgaagtttggtattgattatcttcatagctgagaaagatctttcagtagttgctgtagaaactcaaagagtgagtacaagtctaatcactctatcaataagagggtaaatgatggacttcccattcttgctagcccttgacataattttgatgtagttgatagattaatcaaatctggatgtttaggaatgtcaagctcaaaatgttgtaactccatcttcaaatgcaatttttcttgttctgtgaaatctctagaataaaatttatcaacaagtttgtaaatatcatcaatgttaaatgactagtacctgtttcttggatctaaagccatgctcaaagcaaacaaaaaaaatatagtcctaaactcctaatattttagcatcgttgacaatttcaggctattaaatagtaacaaaaaaaacaaacaaacaaagaaccacttgtaaatagtagttctttttataacaaaaacgggctaagcccaacatggtagagggtgcgtgtgtaaaaaaaggaggtgtaaacagtagtttatgttttttttaatttcattttagatttaacaaaaacaagctcagtccaacatggtaaggggtgcatgtgtataaacaaaggacataaataacagtttattttattttaaaagagtaacaacaacgagaaaggggataagaaagatgaaaagaagaaaaaagaaaggaatgagggaatatctaaaacccttctctttcattggttgcagtaccaaatgaaacaacttttttgacttcttctgttctcttggaatttgtgtctcctatttgtcctctacctgtgtttttgtatccagacctttctgttttatagtgttctttctccctctttctctttattctttccctttttttattattttttttccattttatcatcttcctttccttttttctttttctgttacctctctttccctttttatttttattatattttctttccttttttttatatatttttttcctcttttatgttttttttcctttttattaatttaatattttttccctttttcttttctttttttattaggttttctttatatttttttcttttccctttaacttttttttaatatttttctttcctcttttttatttttcctttcatttttttcaaattttcaaattttaagggggggggggtggcccaccctaattccgcctttagtcctttttttcgttaaatcggagggttaagacaaaaaaattaaagagagaattgcgatgcgagagactgagagagcacacaaaagggaaatgaaagcgtaagtgggaaggttttcaaagacggtttgtcgaaaaccgtcattgaacacttgcttttgaagacgattatttgaaaatcatcgttgaaaacttgctttggaatacggttttataaagccgtctttaaaaagtttgacttaatttcaaaaattccaccacttatttttctacattggtttttcaaaaatcaacttagattcaacaattttaaaacatgcttttttagtagtgcaattaacatttgttgataaaaaaaatccatggtttgttgctatttatgttattgaaggaaatggtgttctctgtgagggtttaccacatggggaagtttgtaacctcttcggttcttcactacaagggaggcaaggaacatgttaagcatggagtggttccggacaagtggtcttgtttcgaagctcatgtcatactaaaggatttatgtatgatggtgaggtgaagctttggtggaagcctaagtgtgctagcatggagaatggtttgagactgctgtgtatggataaggattctctcaaattagacaaatatgcggagaacaatgatgacgaagtctggatttatgttgaacatgtagtttgtaatcctgagataattgagcagttggaacatggtggggtaaatgaagatggtgttgctgggggagttttggggggagggggtgaatctatggttgatgaagaagaaaggaatgcggatgacgaggatgaatttgggatggaagaagataatgtgcagctgcatagagaactgaattattatgtattaaagaagacgaggaggaaaacaaatggaagagtgagcaacacttttgaaggcacattcaaaaacatacaacataatctagaaagtcatgtaattgaagtggattatagtagtgaggaactagaaactgatttggaagaggagaaatgtactgctaagtttcccaagtttaaaagttcataaatgtgtaagagttagaagttcaatttggggatggaattttcatcattaaaggggttcaaagcaataatataggaacattctatgttaaatggtagggaagtgaaatttatcaagaatgatattcttagagttagggttgtgtgcagtaagaagtgtgggtatcttattttatgcagcaaggttcgtttagaagaaacatatagaattaaaacatgcagggataaacacagatgtggtagagtttatgctaacaaaaatgcaaggaatggttgtctaaagttgtagttgaaaagctcaaagatgtggggaatatggcagtgaatgaaattgttaaggatgtgaggaggacatacaacactggaatcatagtgtataaagcatggaaagcaaaacaaaagccagaaaaattcttcagggcacttgaagggtgttgcgcaatcggcaagtgtaccgatcgttccaagtaatacagtgataaatagagtatcgtctccacgaggattgatgcactaattttattgtaattattatctttaaattggaaggaataaaatttaattaatttatgatttgtattgtggtttgaagaatttaaataacaaaagaaaattgcaaatgaaattaaagataaatttgattatgattttataatttatgggaaagaattgtagtcaaagcacttaaccttatgatccctacctcctttacttggattaattactaaattaattattctaaatgttcagataatgtatctttccatcaaactagttaaaccctaatcccttagtgactttaaccctttaattcaattaaaaccctaattccttagagatctctcataaattaagcattaagaaatacattaattattctgcaatcatacatccctatacctaggtaatgtaacaattgttattttactctcatcaataattaaagtttcaacattcctattgtaaatcctaatcctcagaactttattagaatgatcagctgttaggaattttcggcaagcgcaccggtttgtcgttgtaagtttcaaaatttatgagatcgtctccacagggacttgagcttactcaatagttatgtacaagtaggttgagcagaatttcatttagtggtgcaagtaatgtaaaattactaaattttagtaaatgaaatatatctatgagaaagtgagattggatttcatcattcttatccttttatatccaattaatattaccaagcataaatcatcgtctatccttattgatgcacactatttttaccttgaatcgattcctcgcattcaagttctaaggatatctaccgaatatcgatccctcgcatatgaagtaaataccccagcattaagaactacaatcgcgtgcttttatgcaatcaaaacgttatgccctattactagcaacgtaacgtaatgagtaaaatcattcggttcaaaacctaagattactttccagtctcacttaggattaaattcatgaaactagtgatcaagtagaatcaagcattaagcacaaaatgaaattaccaacaagaaatagaaatgattaatgcgtaaataaatattaaaagagagacataaggttaagaagattacatccaatccacagagaagttagccaagcatggagagaacctcctcaagagaaggattgatgaagggcccatcatcgcttctttctggaagagtctccacactaatcctcacttctctcactttcctaccctacctaatactactatttaaccttcctaaacctaaggaacaacctaagcaagaaaggtgaagcaaaaagcatgcataactccaaattttcatggcctatttatagaaatcatgacctgcatgctttcactcgcccaggccaccattttcttcatgttttggtcgcctgggcgagcttaacatatcttcttgatacttgtagctcacctgggcgagcaaaatacactatggttggttgcctgggtgagttaaagtcttaattctgaagaaagctttgggccttgatggattctgggcctggtttgcttgttacacctcacatacttgctatataagccttctttgcttgctttacttattcgaaagcttcaaaaatccacggaatctatcaaaatacaagacatgcttggattaatcttccaaaacaatttttatttaagtactaagcatattttaactaggtttaggcaagtttataagcaaagttaaatggaatcaaaagataagtgccagcatttaaaatatgattttaactgaaatatggcacttatcactcccccaacctagaatcttgcttgtcctcaagcaaagtaactgacactttaattaataggagtataaaagatgatcatgctttgtaaagaatcaactttctagaatgatcagaacatattcaaaattagtcaacttcgagatttgaaaatacaaacgatggagttcacaaaaccaaatgagattaagatcaattcacatttcatttctgaagaacataagaggacacatgtgattgattcaaacagaggaaaacctctcaaaagtgtttaattctcccacaggtaagtgtttattctcaaatccatcactgatatatcatagataaattttgtagttcatttcccatcaaatcaaagtacatacttatcatggatcattagtgctttttaggttaggcctggctaaaaaggggtcttggtttttttggatattcaaaaagtaccttgagaataggagagcaaataaagataaaacaattagatcatcacttcatatttttctttccaagatatccatgtttattaatcttttcattcacccaacttcgtatcatttaaaacacaaggaattttgtttcctttttctttttctttttcttttctttttctttcacatgaataatatatagccacttttaaaatccatttttcatatcatgaactacccaaaagaagtttccatcacaatttattctcatttgctctcctaaccttaggtaaggtgtagaattcctatcctaggttagggtttcaacaaaatatcaactgtttaggctcaaaggcgttttacaaaggataaatcatttaagtatgttgggatagctttttttttttttgccagtggcttaaaaagatgttcaaaaagaannnnnnnnnnnnnnnnnnnnnnnnnnnnnnnnnnnnntgcatcacatgttatcacaattagaaatttatgcaaaatcaactataattcttatcagtgaggtcactcaatataatttacgcggttacacacactcacttgggctctaggtttgttttcatgttcaaatcaaatcaatgtttcgaaagatgttcattatcaattccatgtaaaattctttccttcatttgatatttgaaaacccattcatttgtttttcattctcaaagtttccaaaaatcattttgtggtgttctgatccaaatcaaaaagcaagttcaagatatttatctgttgattcttttcaaaacatgacatatcagttaagccccaaaaaagatttatacaggcatgttaagcaaacaaaaaagtattaaaaatgtatattttcaaaaagagagaaacctttgtgtgcaagaaaaagaaatgcaagcaaacatcaaatatagtgactaaataaacaaagtactgaatttaaactacaaagcagtaaagaaatttaaaaacaatgtcactgatttttgaagatcgttgctgagaagctcgatgtcctccattcagataatcaacaagatctaccacattcttcattctcacctgcttttccttttcttaacaaaatggacctatatccaagttctaacaaaacagatgatacattcaaaaagataagacatcaaaaagtaaagttcagacatataatttataagcataatttaaatgacataaataaagacaaaaaattaaaaacactgggttgcctcccaggagcgcttctttaacgtcgtattagctggacgcctatgttatggttttgactcccagcaattggacaatatggatgagcccttggcttttgtattttcctccaatattttcaccaatttcttttcttttggacttgttttgctgataactggtttctttaaattccctgcaaggaaatcattgttagcatatggaggtactgcgtttacctttatctgtgattcttgattttttacttcctctgacaattcctcaaagataaactgttggtaaggaattttctcgaaagcatctgattgttgtagatagtctaaactatcttcttcttcatatttactcatctcctctaatgcttcatctgaataatgttttccttgaaccaacttcttggagtcagaaattcctccattcgagacatccactctaaaacatcctcttggttctattggattatcatgtgattttgctgaagagggtccacttctgtgctcagacagttgttttgcaagctgtcaaacctgaacttcaagatttttgatggaagcctcagtgttcttttggtttgaaatggtcatctgcataaactaagttagagtatcttccatttttgatattctatcaggctgagcttcttcttgttgttgtagtggaaccctatttgaagaacctacataagagttgttagagggacctgcaaaagaagagttagtgggaccataatatgcattttcatatttctgcttccaaccataagaacttgtaccatctctgtagccttggtaatttccttggaagttctgttgaggtttggtctgattctgcatataataagcctgctcttcttgttggcaatcaccatgtagttgatgaaattgttgaggaagttggcctatttgtttggtcaaggcctctatttgttgagttaagagcttatgctgagctagaattgcattttgagtatccaactccattatacctttcctttgaatcggagatctatcatgatgagattgataatcactggctgctatggagtcgatgatcataattgcttccttcgggctctttgacatcatggtacctccagctgaggcatcaagaatcatcttggtttgaggtctcaaaccactatagaaaatatgtaactgtgcaatatcatcaaagttatggtttgggcatctacgcagtaatgctttgaatctctcccacgtttcaaagagaggttcattaaacccttgagaaaaagtagcaattgcttattttgcactaatgaatctagatggaggaaaaaatctggcaataaatttttcctccacttcttcccaagtgctaagactcttattaggttgagattgaagccatacctttgccttacttgtcaaggagaacggaaaagctctgagatagacaactttagcatctgcatcagaagctcccatggtactacatagctccatgaaggtggacaaatgagtgtatggatcttcatgatctagtccggaaaaaggatgtgatccaattagactaagcaatgcgggcttcaattctacaaccattttactgaaaggaggaatgactatgctgttgtaatgctttggtccttgttgatatgcatagtcacccagagtcctccttggtggtctattttcctctccctatctatcagccatatttagaggtgactttactagtgaaggataatcaaaatagaagatgttttacccggtaactttttggttgttttgtttattttcctttatggactaggtaattcctaaattttaataacgatgtatctgcaagaaatttacctcaaaaaggaaaataaacaaacttgcaataatttataagtaccgaggttagggaaagtaaataaaataaaacacaaatttatacaaaattaaaaataacaaaagcaaagaaaaagtcctattcaactgcgaaattaaatttgaaagaactgagcgagcgactcaagtccctggcaacgacgccagaaacttgttaggaattttcagcaagcgcatcggtttgttgttgtaagtttcaaactttataagatcgtctccacagggacttgagcttactcagttaatccaaataaaattaaacagttcaatagttatgtacaagtaggttgggcggaatttcatttagtggtacaagtaatgtaaaattactaaattttagtaaatgaaatatatctatgagaaagtgagattggatttcatcattcttattcttttatatccaattaatattaccaagcataaatcatcgtctatccttattgatgcacactatttttaccttgaatcgatccctcgtattcaagttctaaggatatctaccgaatatcgatccctcacatatgaagtaaataccccagcattaagaactacaatcgcgtgcttttatgcaatcaaaacgttatgccctattactagcaacgtaacgtaatgagtaaaatcattcggttcaaaacctaagattactttccagtctcacttaggattaaattcatgaaactagtgatcaagtagaatcaagcattaagcacaaaatgaaattaccaacaagaaatagaaatgattaatgaatattaaaagagagacataaggttaagaagattacatccaatccacaaagaagttagccaagcatggagagaacctcctcaagagaaggattgatgaagggccccatcaccgcttctttctggaagagtctccacactaatactcacttctctcactttcctaccctacctaatactactatttaaccttcctaaacctaaggaacaacctaagcaagaaaggtgaagcaaaaagcatgcataactccaaattttcatggcctatttatagaaatcatgacctgcatgcttccactcgcacaggccaccattttcttcatgttttggtcgcaattggacaatatgggcgagcttaacatatcttcttggtacttgtagctcgcctgtgcgagcaaaatatactatggttggtcgcctgggcgagttaaaatcttaattctgaagaaacctttgggccttgatggattctgggcctggtttgcttgttacacctcccatacttgctatataagccttctttgcttgctttacttattcggaagcttcgaaaatccacggaatctatcaaaatacaagcatgattggattaatcttccaaaacaatttttatttaagtactaagcatattttaactaggtttaggcaagtttataagcaaatttaaatgaaatcaaaagataagtgccagcatttaaaacatgattttaactgaaatatggtacttatcatcagccctaataaagatataatcaattcaaacagagtaaaataaaacaaatcagcataaataataataggaatgaatccaattatagaggagttcacattaggttttggccctaactacaaagatagaggaattagtcaaacatcgttatgtctgactctaatacaataatgtgaaggtaaattaacaagagtatagaagaagagtatgcgaaagcccccaatcttggacccttatgttcctatttatacttaggtcataacagccctaatatcttttatttttatgttatcttttaagctaaatcgtaatttctgtgaattggcgcgagatatggcacgattggcgcgagctgcattaagtgtggcgcgactagcgcgggactggtgcgactcacgtggacttacataatctgtttgtaagtttctgtcttctggcgctgatggcgcgagcctggcgcgactggcgccagcctccagaatccaaacttgcttccttgtttcctggcgctgatggcgcggctatggcgcgactcgcgcagaattccagaaaaccttagcttctttattttgcttctttttcttccttttattggcacctaatataaaaaatgcatgaaatcagtagtaaaaacaataatgatgaaaacttatacttattctaacatttattgatagtttatattcaatttattaatgattttgacctaaaactactatatgctaacaacatatcaaataattcccagatttagatattgttgtcctcagcaataaagtaaaactttatgtaaggaaagctatattcaacaatcaagcatgtcatcacatatacaatctcagaactactctgttaaatgcaattgaattccatatgaaattttcaaaaatacttttcaattctatcaacatagaatcttaacttgaatacctctcaccaagagatataattcactcatcgatcactcaagtgttttgggtaaatataatctctcaattcctccaaagctataatactaccataggcttgattatattctcaagttcctgaaaacaagaaacatatatacatgcatagtttgatcaaaaggtctttataaggttgtaacttggcctggcttaaaggtaagaatatttgggaagtagctaaatatcattgagattggaacattgatcttctatagactcacttagatctcaatttggaattagttctccactacttctttttattcataatttttcattccttcttttgttgtcctccttttgtatttctttcttttcttttcttctattgaactcatttgtagacaattcttttctttccttctatcatcgacttttagtggaattcactttgatcacaacaaacagaggccaagaaaacagaggccaagaaaacattgattttaaaagggtggaagctcatgttcgccaattgaaaggtagcagctccaggtaataatatttctttaccgctagtttcttcattcttaaaatctcagcaaaaaaaagtgtaaaaatttatatggattattgaggtgaaacactctgtagaatagtactaaaagaattttaaaaagttgtcataaaaaatagaggggaaaaatgttcaccaaggcgtctaagcttaagtcaaatagcatgtacaacttggggtggtattgttgtttcttaagttggtggaagaagtataaactatcaagtatcaatctgctgcaccttttttaccagtgatgtccttgcttcaccgtacttgcactctagtagtgtgttactgttgcaacttgcaaggattggatagcttagttccgttgcaacttgtaaggattggatagcttagttccgttgcaacgagagggaagcacataagatccaagattgaatcaatttccttgtagttaaagggaaagagatcaaggattctattattgaaatatacaaaaattggttaacaaattgctggagcaattctcttccttgcagaagatgagtcatcttctcaggcctaacctaaacaaatactatgtcccctttataacaacctgcagacccatacattctctctacaactaacaacctagataatgataagaggatagctcattgcattccagttgcctctctgacttgtttgaattatgctgggccttgcaaattttgtttgaactggtttgcctccaccttgtgtctggtgggaagcagtactaaaagaacaataatgatgctaaactgcacttgttttcttcaggatgttgttgtatattatattattttttgtcgtttgaactggtttgcctccaccttgtgtctggtgggaagcagtactaaaagaacaataatgatgctaaactgcacttgttttcttcaggatgttgttgtatattatattattttttgtcgtttgaactggtttgcctccaccttgtgtctggtgggaagcagtactaaaagaacaataatgatgctaaactgcacttgttttcttcaggatgttgttgtatattatattattttttgtctattcattcatcacttgcacttcttacatgagaaggtgtaaagcttctcttttgctgtttatgttattaacttccatttttacctattattcatatcaggaatttaatgttgcatgttctatttcagaggttatttggcaccagagtatgcaataagggggcagctgacacgtaaagcagatatttacagctttggtgtcctccttgtggagatcgttagtggaagatgccacacaaattcacgattaccaataggaaagcaatatcttttagaaatggtatttctttgttatgcttctagttgtattgccgtacctttctttgttgggggaaaataaattagtttcttatgctcatctccttgctaataagcaaaaaactttaaccttttattaagttacttacactgcaaagattgtgatcacataaccttgtatcctatgcttctagttgtatggaaaataaatgtggaatagttgaagtataatatttgtgttgttatttctagcgatgcatttccttttctttcttcttgccttctactgtaaaaatatttaaccatacaacaatatataattatattgtgcctttaacaaacctagttttggtgcattttaaattttagttacttctcaccagtcaaattataatattatacttggtttcccgcttatatatgtttgattctatgtacagaaaattgtgctttatagtttaaacaacagaatgattgcaagtgttgatcaataaatttgaagccacttttgaattatgaattatatcattggaaaatctcaaaattatgcctcttttttcttttgttataaaatcatcattaattcctattgaagttgtgaaaataattatagaattaatggaaataattaaaactagagaaatattaatgagtttttttaatcaaaaaatactatttttggtggaaaaaaaactgtgcttggcaaaaaaaaaaaaaaaaaaaaannnnnnnnnnnnnnnnnnnnnnnnnnnnnnnnnnnnnnncgtgaaaaaattaaaaaaagtgaaaataaattttgtgacagcttttaaccgccacaatgtttttgacgtatttatcagcgttccacaaaaagccgtcacaataaagccatcacaatcttttctgacgtcattacttctgaaggtcaatcttgatcatcagacattaattttgtggcggcttttagccgccagaattcgcttttgtagccgccacaaaaatctcatttttttgtagtgtttgaaggagtatgtcaaattatgttgctatcaataacattctattattattattattattatttagaaggttattatcatatttttaataaattcttttaaatatttttttatgagtttaatatatatgtactgataattacattgtcatttaattataaatcttaatttaaattattttaatttaattattttaaaaattaataaacttatccaataggtttaatgcatatgattgtaaaaaaatttacacataactgtttttttttattagttaaatttaacgaagattataagattatataacagattattgtttatgcattttttaaaaagagattcgttaaataagatgtaaattaaaataataattgaaaacactattataaattattaataagaacaaattaataagaataatgatcaaccaagtctaaagtctttgtttgcttgttctgtttggagtcaaatatcaaagtaggcgttcttgacatgactgtgaaaagtagtgttattaaacccagttcggatcggtcggtcggaccggtccaactgggatacggtggcattaccggactgagtaccccatcggaccgctcaagcaaatgacttgggatgactcgatcaaatccggccggttttgatgaaaaccggccaccccgatggtttttaaaaacccggactaggttgtgcaggtcgtcgtcgccagtccccactcgaccaccgtcgcgagcaacctcgtcaccgacaacgtgaatgaaaacgtcgacgacttggaaggatgtaacagaccaggaggaagagagaagaggaagacacggtgaggggagaggggagaggggcgaggctctgggaggggggaggtgcaagggaaggggccccgggaggggtgagacgcagggatgggcgaggggcgacgcgacaaggcacgacaaggagggcagcaggagaaatggagaaggaggcgcaagagaaatgaaggagaagggaggcgccaagagaatgtgagagtatatatagtagtggggattaggttttagaagtgggcctcatatccatatttgcttcctgcacccccgtttattactttctttactccttttgttcatttttttgggcttgtgttttaatttaagtaattgctatttacaatttcttttattcttaatacacttaacttgtattattaactttttgtacttcaattgttattttaatttttgagtatatttttcttaatcaaataatgttagttatatatttatatataatataattttattttttttaatatagaccagatcaaaccgaaccaattactgacccaccagttggatcactgacccactaccttaatctggtcggtgaccgaaccggttttcacaccattggtgaaaaataaaaattctttttctcctcgctcacgctgctggcagaaaaagtaaaattccaagtgcgaggtaggttaaaccgcgccagaatgtttcaccgctaaaacaataattttttaaaagtttatgaaagatatatgtttttttttttttttttttttttttttttttttttnnnnnnnnnnnnnnnnttttgaccgaatgaaagatttatggtagcattttaaatttaaattactaaatatagcatattttaaaaatgtttaataggtctgtagaaaaaattgtttaatagctgttcataaccggtaacaaaaatgtcaaatatgtaaattatgtttgaaaaaattaattaaaagctgcaagttgaaaattggtagttatttattgaagataattatttattgaagagttaacttactaaattataattattgataaaattaattattaaaatatttgaaaagtattaaatgtcaaaaaataataaaattattatttatttaaaaataataattaggaaattttaaaaannnnnnnnnntattttatttcaggattatccatgatattaaaattatttgagtggtgattatttttcaaaagagaatttttcaacaagtgtctcttatttttatgatacctcagtaaatatactcactttcatagggatatatgagtgaaatcattaatagatcttactataattagtgctaaaagaaaatataacaatatattaattttatatttcttataattaagataaagaaaatgttatccttatatataggattaaaggtaatattaaagataaaaatataaaaaaattagaagtcaatatttttagtatttcaaaaaatagtaaaagtaactaaaaagattttttatcaaataattaaacaaacttttaagtcaattaaaaaagtaaaaaataatttaaatctctaactgaatataattttaaaataattgctaacaaagtttgcacgtacatttcctctctaactgaatataattttaaaataattgctaacaaagtttgcacgtacatttccttttctaatctatttctatttataatatataaattctagacattaaacaatacgttgtcacgatgatgtatgcttgtttatttgccatgtcagcttatttctttctaaaaggtatactacatgaacttcttgaaaccatacagaatttaaatatctcaaaatctcccttcgatctaagcctcatatttgttatattttcacctttgattgtcgcaccatgattacctaatgcattatcatattatcaccaaattcattattgaattattttccaaatagcacaagctctatcaaaaatcatatttagtggatttttatttggtaaatcaagcacagtatttaatgatttttattattaaatataatttaatatattaataattatagcatattaaaaaattgagtctactaattacaaattaattattaatatataactgcatattaaatatatttttttactgctcatattaaatataattgaaaactattagttaccgttacaaattataacattaccttgttatcaaaatttaaaaatacccgtgactcgatgcatattctaaaataattattatgtttcattttgatacatttgtctgagttgatttttgttaataaaatatttcttattttactttattttattatcatgcgattttgttgtacatgaactcttttgttattagacttagaggttctgtttttaaatattttgaaaataattccaaaatcttttatcttataatatataaagtatattttgaaaactaatgtgatgtaggtaaatagatattcagaaagattatagtatccaattatctcacatgatttatgccataatttccctttttaatataaaatgacaattggtatcaatattctattcttaatgcaggagacattttttttactgaaaatgcaggagacatatcatatataatgatattaattcaatacaagttttaataattagttaccttatatatgcacccaattaaaaatattcctcgactcaatttttgcattaatgtataaatatttgaaaatattatttgcaaatcatatgatcatccaaccaaatactcaagagcacgattaaaagtttgattcacttcgtgtacaaaatttatgttcgagcttagccagtatcgtatcactcctctttatcttcatcttcttcgtaattgaagggtagaggtactgacttgaacgcacggtactttccaacattagtcaagtgctcattctcaattctgaaagttagaaatgtagcaattaaattttggaaattatccttgtttctacgaatacatggaatactaatttgcgatacataagttaaaggatctgatgtaacgacgtttagctattttagacacatcagtattgtgattttattaaaattattgttgcagttttaaaggatctgatgtaacaacattaggttttcttagacagtaaggatcaaaaggttaaaaaattgcaattgtataaattaaaatgagatattttaaactaaagacaaaatggtaaaattgttataactataagaaccaaatcaaatctttaatttcatgtttacctaaagaagttccatatgccacgacgaatgatctctagacatgcaacaatggtagtcatggcttgtttatgcaagaagctaaacttgaaattcaaaacagtctgcaaccaggcaaatctcaacaacacattaaggacctgcatggtttcatcaatttgtcaacacctctttttccaattttagaaacatggaaaaacaagatatcaatcataattgtaaaacatgttagaaaatttcaagcacaattgttccctctcacataccatggctatgaaataaacacttttatgaggaactgcaagtttatctctcaaccagcggttcttggaatccttttgcaaaaggccccaatcaattacaaggtcccaatatgtagatgcaactgctgcaaatattgagaaaatccatgccagcacattccacgccattgaattgttaagactataggctgtccttaggcaaacagcaataattgtgaggaaatatttcaacccgttatatccttgcattggatcttgctcttcgaacaggcgcctaagacactgcaaaatatttaagaaaattttatttaaaacatgaaatttttgtcataacagtttttgttcagcactaggaagcataaatacagatagcagtctaatgatcctcttaaataattatataatgaagtataaaataatatttgtgtatctaaatattaatcttgtagtcttgactaatctggagttcgtttggaagataactaaagtctaataaaaaattatttccgttaagtatcgaatttgaataatacttgaactatttaatcttaatttcaatacaataattatttttatccaatcacttgattggtctaagaggatattacactactttgttgataaaaatggaaaaatttagtcacctggaggaaacgagagcaatagggaataacagcaattatgaatgaaaaagttatgaatacactgcttttgctgcaagtgttttctctatgtttgaaatccccccagccgtagtagcaaatgtagaactctaaatctctcaaggattgcacctgagtacacaatagtatcacaatgttatatattggcaaagagcataaaagggaatgataatccaaggattattattgttttaatttggtaacaaacctggctagtaaattgatctgccaagaagaaatccgggagtgtgacctgaaatacatggaaaacaacaagtgttagactatgctagaaaattagcaaaattcgtaacgaatgtgtttgtagggacttttctttaccttgtaaagaggagcacatatgcagtgaaacaagcatatgaggaaaaaaaccctgcttgagcgataaaagatgtttatagggcacaataagatagcaatcacaacctgcaaaataataatgaatgaattcataatgtacttcatactccagtacttgaaatatttagtggcaaaatatttccaacataaactacttacaagaagcaagatgagtggaataagttcagtaaatgtttggtaatcttttgtctgtggatctatctgcatgtctaggtttacaagcacgccgccgagtgccaacactgctagaccaaaacctaggagaagcacttgattgtagcccaactcaatgccttgcttaaaaccaaatatgaacgagtgattcactctgtaccgcctccagtagtataaatttgcagcatacatcagcatgtgtagaactacaaatccatacagactgcaaaaaagaaagttgaacatgcttactaggtacatgtttggataatccatacatactcttgctacctgttattctgaacgtattattggaagaagtgcaatgataattcaaacatttttagttacaagaatttatattatcattcaatcacaaattaatatgtatgatcagcttgttgactttgataataacaaccttaaaaagtcatattaaacatgatttttaatttgttgatagtgtaaattacagtgacgatgcatactgatttagagtctcacaacaaaagcaactaatttgagaaatgaattcttgttaattaggatgagctatggactttggaaaaattacctgttaagtgggaacaaggtatccatgtacttagtactccctggcgtttgtagtatgtgacgggtacgaacgattagaataagggctaagactagagcagctgtgcatcctgctaagaaccctgagaatatgttgacaatgtcaacagaatgaacaaatgagaatcaaaatttttcttctttttcaccccaaaataataagattttaaactatatatacatgaatatcttgatgcttacccgtggaaaatgtaaccctatgtctttctcttgttgcagttggtcttaagatgctcatggctttattacgatttgagttgtagaagtgcttagtgaatgttttttccaccctatccatgagctttgtgacctgccatggaaagtgactagttgtgactaaaaacattgagaaactcgtattaacttttaaattgttatccaattataaattattatgtcatatataataagtttattgacttttattataattgtataaaaatcatattataatttttgattgattcacaatataaaatattttacattgatagtgaatagaaattaaacttgtaagaataattaatgaatctcattactaggccttcattttagcactctcacctcatcagagcttccaaggtaggagttgtccaccattttcatataagctttagctgcatctcttgacgtgatctgcatcaagaagtactcttactatatcaagtgatagcagagacaaataaactttaaatgagtaaaatgaaatgaagggtaattgaattttcaccttatcatatttcttcattatctttgaaaatgccaaggtatttagagaactgttgatttcacgaaaatggtcagataatcacatgagaaatacaaggtaaaaaatacataggcttcttaattacattacctatagctttttagaagcctaagcttgcggtagaattcaatgaatgaccctttaagttgttcctcaactttgttcaaattttttctgctgaaatttagttctgcatggccagggaaattgagaacaccttttatagttgaacgtggagtttcatgggtgtggttgaattgcacacgatcaagtacttccaaaggagctggtctagtaccagtgatattctttggcttctgtacctcaacttttggtttcacagtttgttttacttgttcttcttgatcatcattagaatcatcatcatctgattgttcatgatgagtgctactttcctcaatcacctccatgaccatggaaacctttcctgtaaagaagcaaagaagcataatgcaatttaagtcgtacactctaatataggggcttttttttagcatagatatgtgtatctttcttaaaaagtaacgatgctcaagtcaaataatatcccttccttgtcccataataactgtcaggaaaagaagaaatcccataatcattgtcaagaaaaaaaaatccaaaaaaataattatcattttaacttgatgatgtaatattatttttttttcttctatttgtatatatcccatataatattcataatgggcaactaaagctaaaaaatgtaatgaggataaggttaattattgttatcttttattcatttattgatttttttatctatgtaaaataatctgagataacaattataatgaaatggaggagtattatgagaggtaaannnnnnnnnnnnnnnnnnnnnnnnnnnnnnttcatttattgattttttttatctatgtaaaacaatctgagataacaattataatgaaatggaggagtattatgagaggtaaaattatcttttcaaatattacctccgattttctatataagaaataaaataaaataattttcaagtcttaattataaggaacataatataacttttatgtgtattaattactaatttatttacacttatctaatttatttaccaagtatagatacgtactcaaaggcaaaaggaatatataaaataattatgtccttcaataacgattttattgatagcctaattttacttgaattttctaatgatatttatatgtatgaagaataaaagttacgttaaccagtaaaataaaaagttaggttaaatttgacaatagcttgagtaaggctagctaaatgaatacctttgtgaaaagtaagaataataaatgattttaaattgatgaagaaagtcaaatannnnnnnnnnnnnnnnnnnnnnnnnnnnnnnnnnnnnnnnnnnnnnnnnnnnnnnnnnnnnnnnnnnnnnnnnnnnnnnnnnnnnnnnnnnnnnnnnnnnnnnnnnnnnnnnnnnnnnnnnnnnnnnnnnnnnnnnnnnnnnnnnnnnnnnnnnnnnnnnnnnnnnnnnnnnnnnnnnnnnnnnnnnnnnnnnnnnnnnnnnnnnnnnnnnnnnnnnnnnnnnnnnnnnnnnnnnnnnnnnnnnnnnnnnnnnnnnnnnnnnnnnnnnnnnnnnnnnnnnnnnnnnnnnnnnnnnnnnnnnnnnnnnnnnnnnnnnnnnnnnnnnnnnnnnnnnnnnnnnnnnnnnnnnnnnnnnnnnnnnnnnnnnnnnnnnnnnnnnnnnnnnnnnnnnnnnnnnnnnnnnnnnnnnnnnnnnnnnnnnnnnnnnnnnnnnnnnnnnnnnnnnnnnnnnnnnnnnnnnnnnnnnnnnnnnnnnnnnnnnnnnnnnnnnnnnnnnnnnnnnnnnnnnnnnnnnnnnnnnnnnnnnnnnnnnnnnnnnnnnnnnnnnnnnnnnnnnnnnnnnnnnnnnnnnnnnnnnnnnnnnnnnnnnnnnnnnnnnnnnnnnnnnnnnnnnnnnnnnnnnnnnnnnnnnnnnnnnnnnnnnnnnnnnttactcatatattagatattttaatctattaaaatatcataatcattgataacgatgtatgatttaaacaacatctttaacaatctggctgataattactgtttctactttctaccaagttaagtgaatgagcgaaccaaccgcattaacacttaacagcagcctattttactaaaattgcaacaacataaagttttgaccacatcttaattaacacgcacacctttctttttattagacttaacgttcattctattcacacgtaattgagctcaatgaatttaattacaatgaattcacacattaaatggtttttaaactctcgtttaattactaattacatatgataaaattattaatttttatactattttttaaaagtcatatttatgatcgtttctaatcgatcaatagtgtacgtaaacatgtttatattacgtttatcaaaattaacttattgaaattattaatttttataataattacactaacacgatttctaattaaattataataaaaacgttagttataaagcatctaataaacaaataagaactaattatttcataatctcaagctattaatattggtgttttgtttggataaatttttcatgaatatttgttagagaataagataaaaaaaaattaatatttttataagttaaaatttaacttatacataatctaattcataaaaaatttctcaatttagtatcttttaaaaaaaaattagttttttttatatcaatgaaaaagtttaattttttttggtgaagtttgccaacacgtgaccatattgaccatgggcaaacacaggttaaatactatgggagtaattgtcctcacagttttttttttttacttatatatttgataaaaaaaatgtctaaaaaaacaagtgttgtcccatagaatatgtttttagatgaatgtgagacattataattaagagaataaattagtaataatttatgatttcatccttctaattttatcgtttctcttataatactaaacacatttaaatcactgatacaaacatacactttagctccattgtaatttttaaaaactggtttaagtaatttggattcttttcatcataaattatgcatttaaaataattatatgtctatttataaaacatagttgactatattaaatttattaaaaaaataaataatttaaaaattaacattaaatttattaataacttttttaaaatttctccttaattagcattaatcgttgcatatttatatcgtcaactttcataggagagataaagtgacaatttataataacatttaatcatagattaaaataaataaagatatttttactaaaatataatgaatgtacaagagaaagatgaaatagagtctcataataagagataaaaaaaatttattaattatgtcttataaatagaaagtgatatttttcttttgtagaaagataataacaaaatttcttgatccgctccacagaagtctaagcatggattaagttaatgggaaggtttttttggataaatttatttaaaaacatttcaaagataataaaaaaaaattgtttcttgataagttaaaatgaatttttcattagttaatttataaaaattcttttataaaatgagagaatatctattaattaattaataattaaccaataaaaaaattatttttagtttaaaaagaaattcattttatttttattttttattagaaaagtttaccccaaatttactgtgagcacaaataaagtaaacaagttgaagaaaggtttactgttcaatttggctcctctgggtgtggaagctgccaacacagcagatgaagaagcaacattagaagcaagacgagtcatctcaacagatcgatcaaaggacccagttgggttctcaactttaatcctgaaagctatcaaagcatccatttgcttgttgagcattgcagcttccttcatcacttcctccacttttgacatataaaacttgtccactttgttgaactcatcatcgagcctcttgaagtacaccaactcgtattctccaccttcttctgaagtcatacggaacgtagtttcgtacttctcagaaccatcatggttgttcactgagtgcaccataattggttggttctcaatgtcttgttctgagggactaatttgttggtagtgtctttgttgtgtgaggccactgaaggctctgtatagtgttagctttctccttaggccacttggggtgggagaaggcttgttcttaagtttgaagcgttggatttctttcaaaagggttttcagaaaattgtaatccatgtatgcttcttgccattctggcaccatttgggatgtgtattctttcccaaacttcattttttgtggcctttaattatgttggttgctccaaagatatatataggcctaaagggtaacagaaattagaaacttttttgataaaatgaagagaggtgatgaaaagggaaaataattatggatagtgaaagagaatgaaatgagagatcaagatggagaagactaatttatacgggtattttaaaagatttatattactgtgggtttgatagttggtgaggtagttaggggtggaagactaatttagcgttgtacgtttaattaagttcaaaattagaatataaaaaagacaaagggtagataatagacagcacgttaccctgacctttagagaccaaaacagaaagttagaaaaatagtgtcacaaaacaaaaacgttgttttgattttctggaaagaaggggtagtttgtagaaaaagaattagaagactactttttgattaggtctttggttggaaagctttgtcttaccccccctgttccactgtatgtgtgtagaagaaaaacacattattaaaaaataatgtctacacatcattttgtacgttacgtgagttttttttttttttttgttaaaaataaaaaaataatcatctgagtcgttggacaacaccatcaccatgttaaaacaaaaaaataaaaataaaggagtcttctaataaaaccaataatggttggcgttgacaagtactcgactgtgatgtaaggatgtgaaataagatttgttgactgtgatgtaaggatgtgaaataagatttgttgactgtgtgaaactttgaacaatataatgtagtcgttaacttcgtgttggattgttctattactagtgaaatatcgaagtttgagcgcgtgaaatggagattgatcataattttaaatcatttttataaacaaaatattaacatgagtttttttttttaaaaataatttatatgtttgaccaaacttaccggtatgggttttgttctgtcttttacaatgtttatgattttgatattggatcaaagactctctcggaggtatctattaaggaaatacctcttgaaatactgattactacgcccccaaataccagtcaatgaaagtgagatgtgtgcacagtgataatataaaagttaggtcgagagaatgtgtacttttctccatgaatgtaactcctatttataggcaaattacctttaaactaactaatgtcacgttcctgttatataggctgaaatctttctatctgttgagatcacgttccttgtttgttatgactctctgtggttattgtgcgtctaagttaaatgttagtgttaggattctaacacgtaagatccttaatgggcctttcatgaattaacaatgctgagcccatatattagatccgtaacagttgcccctcagaccggttgtcaaggcctctgggcagccgggatgtattactcagactggtataggccgagctacttgaccgtccttgtcctcagaatactttatgccgggttgtctctgtacccctgctttaagtgacctgacatgatgctcagaagggaaaacgtcgtttgtgacatcaaaccatcatgttttttcactagccgcaacacgccatgcgtacatttaatggaacgtcgcttcattacatgtctcaatcatcacgtttaaaggaattttgtcttttctgcccccgatcgtcaaaataacttgtcctttttgcccctatacatgacgtttcgtacctgacctttatgcagtcacgacgcttcatgcttttgacggttatactattatccccctttatctttataaatcactttgtctcatctgtatcttcttcgttctcgattactatctctatatttctctgcatcttgtgcgccctttctgctgcgattcaccatattctgctatcgaaaactttgatcaatctttcaaaaccaggtatcatcatcaacaacttctctctctttcatgtttccattgtacctccattgtaatttcgttcttgcaccatccttttcccaatcttgactttccttttctcattcttgactttgtttctggttttgtcatctttattcattcttgaacttgaattttcagttactcacgttaatttcttctattaatcttccttgtaaactccctgtcttccccacttaaaatgaaactttctcttgaggaagagtaaaaattatgccaaactgtttcccccatgattgggtattggctatttggtcttcccctcacggaagaagaaagggaaaaagccctatttcgctcacatactggtgggacatcgaagctcaaaacattgaaaaccaagacttctacgaacaaacctcccttagacgataaaaaataccagtttaacactaaatcttcctctgaatttttttttgtctccgcctttaaatcatgaattgcgaaacctacaatcgtctgcagaacaaataagtcctatcgcggaaccttcatttgaaacccggttcgacccatgtatcaattgcgttatcgaaagtacttattttttaaattctgtccttgattccatggaggattcaatacttgggcactgtcgtcataacccggttcttgtaccaaaaccaaacccttctcggcagattaagactatgataccgagcgatcctcctaaccttcacccgagtgtcgagaaccctgaaaacatcattcttatcccggatgatccttccccaccaacagacttctattctcgtataatcaatatttttccaggtatgtcactgctttactaactatggcttctttggcgcaggtaattatggacccatcatcagcagaacaatttgcggaaagtcaatcagccgggtcgcaacctgatttgccttctccagccctaatctccaaattttcgtgggtgactcacgaggtgttgctcaccctgtctgacctaacctcaggggacgttgcttcaattcccgtaggaaatcaagagggtttctccacctgtcttcccaaccctaacgagcctatctgctccttgcgggaggggaacgaaccttcttttttcttcttttatagatatgtaatcacccgaatagggatccggttccccctatccgattttcaaatgcaaattttacaccatcttcatctagctccctcacaacttcatccaaacagttggggatttatcagggcctttgagaactttggttaatctttagaaatccccagcactgttccccttttcttttactattttactgtacaaactaatagaacatgtaaagaatctccaaataagaaaggatggacttccatccggggtcatacagatcgtagactctttaatgtatacatagattccttcaaaaatttcaaaaacaaattcttcaaagttgttgttgatcccgacagacaaccgtttttccttttgtctcccgaatcacgggatgtagagtggaaatttctactctattggacccgtacacaccatgatcttccgccctcctcctaccgttttgaagaaacgagtttatcggatgctgacacctactcagtaacccggatagacgcatataaagaagcttatggctagcctagtgtcgcttcttttatacaccaacttagatccgagatttcttcttctcgagtatgagcatgtgtaccttgattggttatcttgtactttttgttttctaactgattactttctattttgtagttgctaatatggaacaacaaccagcctcctctggcactccacacaaatgcccatcctctacttcgggcccggctgctgacgctactgtgaaaaccaaacgtcaatctgtgctttctaatccgtctactaaatagggtaagcaaaagattgctgcgtcagcacccactggtgtcatcatcccaaagcgacctccacccagcttccttgctgctttggatacaggaaaaaataaaaggcaaaaacacacggagtcgcaagtggagccagctcctcatgtggaaccggctttattattgatttataacccgactcctgaaatttaacctgacaccgtcatgactgatgtaccaggcccgatccttgttgcccagtctacttcagcctctaatccttctgatgaatcccggtttccagctggatacctttgggagaaagggattgatgaagaaatttttcgcacacttaaagcacacaaacacttcatggattcgagttgcctcaccaatgctgacctaaaggagctccatactatagaagaaaatgccttcaagtgtgcatccctggttcatagtgtgaccatcaggcggttcgagaggaaactaggaaaacgcacgaagaattactcacaactttcgccaaagctgctgctgatgtggaaattgtccgagccgagcttcgtgcagcgcatggcgaacttcgtagagaggaagaaaatgctgaaaaggctcaatctgctttgaatgctgctcgagtgagaaatgctaccgtaactaagaattttgacactttgaattcagaattttccaagttgtagagcactctcaaacgaacggaggtggagctaagaacagccgaagctgatgtagccaacgtgaggggagagctgtcggcagcgattgaagggtctttcaacaacaccctagagtagattcgtttttgaatcccgggattgaactgaacactgcagggatgcatttcagggcttaccttagtgatggaaagctaatccctccctcgtctccttcagtaactcaaatggaagaagattgtgcggaagaggatgatattattcctgctgaccaaactatggatgaagctcaattcgggaagcagaattgatcaaggccaggatgctagttttaatctgtaatgttcttttcttgttggggctttcaacccccgtttaaatgtttcagacattaccgagcttattctcgatttatttcgttcaataacattaacaattgtgcttatacttgcaaaccattcttttagattttgcttactagcacatttacttgcacatgaatccaagttatcttggattttattagatgatttggctaaaatgaaaaatacttgtcgcaacttgcataaatattcatttggtttctttgaccaggtattttattcggacaatacatgtctttatcatgtgtcccgggttatcgtcctggaacttaatcttgacacaaatcaaattgctacatataaaaatattgatctcccaaccaaatatttttatatttcaacctgatcagtcttgtgccacgatgataacttcgatgcatcataaacgcgaacgtttttactaagttagtgcgtcaatccgtattagacaaagttataacttgcacaatcacaataaagaaaacattttatttataaactgtcaagaaacaattcatgatctcaatgaaagagaacaatatgaattttgggttaaaaatttatcgtaccatggctcatactctcaataaaagagaaacacatgaactatgagttacattgttaattctgacaagaaaaacaggaaacaaatactaattttgcggtactgccgacttattgctccttcgaacagaacattgaatccggatttaactgtaatatattttcagtttatccgcattccaagttcgttttattgctttttcatcaagggtttccaacatataagctccttgtctaagtttctgtgatacccggtatggtccttcccagttcgctgctaactaccctacttgagcgtgtttatttccaatatccgccctttgaagtactaagtcgcctttttaaaaacacctcgtcttcactttcttattaacttcatggctgctagttgttttgctaatagatcccggcaatgtgcattaacccggatctcatctgtcaaattcaactcaatggccaaggcctcgttgttctttccttcaccctcctgaagcacacggtttcttctccaagataactgaccaatttctacaagtatcatcgcctcgcaaccataggtcattctaaatggggtttctttggtagacgtttgattcgtggttctgtgtccccataaaatgtaatagagttgctccacccaactagagccggcatcatgcatccgctttttcaatccatctacaatcaccttattcgctgcttcaacttttccgttggattgcaggggttctactaaggaaaagtgatgcttgatctggaaccgaccatcatctattgaaaccgtttatcagtgaattgagttccattatttgttacaatttcacctggattccaaacctggaaatgatgtttcattcaaaaaatctttgcacttgagccgacgtgatggtggcgagagattccgcttcaatccactttgtgaaataatctactgccattatcaaccattttaattgaccttctgctgccttgaatggtcctaatagatccatccccccacttaaaaatgggccatgaagccgaaataagctgcaactcggcggggggataccacaacaacttggcatgtttctgacaactttcgcatttttttacgtgattggcagaataaacttccattgtcagccaatagtatctagctcgaagggcctttcttgctaatgccttagctcccatgtgttggccgttgatgctttcatgtatttcggtcaacacgtactcaactctatcggggttcaaacaaaccagcataggggtgtgcaatcctttgcggtataattcatcatctagaattgtgtacatagttgcatcacgtaccaatttcttgtcctccattacgtcatctggtaatatacccctttccaggtaatcaatgatcggtcttctccaatcttcagctgtcaagattatcattacacaggtcagtttggaaatttcctgttgaataacagccctatggttacccggactcttggtgcttgccaatttcgagaaaatatcagcccttgcattttcttctctggggatatgactcacgattacttcatcaaaatcatcaatcacttctttgactttattcaaatatttagccaataatggaaccttcacttgatatcgcccctcgatctgagctgtaattagtgaacaccattaccttcttcgctccctgctcctttgcctataacaacccggctatgagcgcttcatattcagcttggttgttcgatgttgggaaattcaaatgaagagattgctcaatagccacaccttctggattttcaattatgatcccggctccgcttcctttcatgttagacgatccgtcaacatataatttccacgtattttctgtatttccaataaccggggttaattccataacaaaatccgccaaagcttgagattttatagcatgccgagctttgtatttcaaatcgaactccaacaattgtatcacccaattgatcatccttccagccaaatccggcttgtgtattacttgctgaattggcttattagttctgacaattattgtatggctttggaaataagggcgcaacctcttcgcggttaccaacaaggcaaaggccaccttctccaacctctaatatcgtaactcggagtttcggagggcccgacttacaaaataaataggcttttgcgttttatgggcttcccttaccaataccgcactaaccgcttcttcacctaccgataagtacaatattaatatctctccaggttctggttttgacaatacaggtggggtggccaaacatctctttacttctgtgaacgcggccttgcaatttgggttccatcctatagtagcctttttttccagtaacttaaagaaaggaagtgccttctctgctgattttgggagaaaacgcgttaaagcagctaatcttctcgtcagttgttgaatctccttcttgtttgttggaaactgcatgtccaacatggctttgcatttatccgggttagcttctattcctctatgggttaacatgaaccccaggaattttccggccgacacgccaaatgcacatttgagcggatttaggcgaatattatattccgttaacctgctaaatgtttcctccaagtcctttgtatgatcattcatggtagctgtttttacaatcatatcatctatgtaaacttcgatatttcgaccaagttggggctcaaaaaccttattcatcattctttagtatgtgacccccgcgttctttaacccgaaaggcataacattataacaatagtttgtcttctcgcctataaaggccattttttcctgatctgctgggtacatggctatctgtttatacccagaataagcatccataaatgatagtaaccgaaatccggacgagttatctacaagttgatcaatattcggcattggataggcatctttagggcataccttattcaaattggtataatctgtgcacaccctccatttgccattagatttccggaccatcactacattggataaccacgtagtgtactggatttctcttataaagccggcttccaacaactctctaatgtgtgtggccagtgcttatgttctttcagggccgagcttccgtttttcctgttggatcggctttgatccggggtacatcgataatttgtggcaacaaaaatttggatttatccccggtatttctgacgctttccaagcgaaaatgtcttggttcctcttgaggcactccatgagtttgactttgatgtctgaatcaaacattttttcaatctttgtgatctgccatgattgatttcctatctgcaattcttccacatcttcggatggttctggtctccattcctcggaatcttccctcatgtcaagttctaccatatttattggttttcccggctgacgttctgctattttccggtcaacctgatccccttgacatatccggggtggtgaagatggaccacattcactttccttgaccgtattgtaataacattattgggattctttttggtccctgcagattgtcaccacctgatccttgttccctacaaattttatcttctgatgcttggtggacatcaacatatcccacttatgaatagttggtcttcccaaaataatattgtacagagagggaaagtcggccacaacaaatttaactctttccgacttgaatgcatctttagttcttaatgtcatccgtagatcaatggaacctttaagactggtatttcctccattgaagcctatcaacactgtcttatatggcttcaagtcctcttcgtccaaattcatctttttgaacgcactccagagaataatatctgtagagttgttgttgtctacaaacatccttttaactcagcaattagtcaatgttccagtaattactaggtcatcttcatgatctggcaccacatctttcatatcctcctccgtaaaatatagaataggaggctctgatttgccggttttccctttgaacttgggttgcactctcatcgaaagaatttctttcaagtactttcgtctttgattggcagtgtctcctcctcctcccagggctccagagatgacattacatacaaattctggctctagaaattcatcatcgtcattatgctttttcttcttgtcttccttttctttcccgggttgagcttcttcacctttgcgcttgttcctatggccctgggtctttatcacgtattgcctcaaccttccctctctgatgaatttttcaatagcatctcaaagatcccaacattggtcagtggtatgccctgatccattgtgaaactcacaaaaccgggatttgtctacccaacccttattatacaatggacgaggccgctccaccttcttcatgtcagtcaacgctacctccccccaaacttgtgaccgggatacattcaacggtgtgtatttttttgtattttgtttcatacatggtctgaatttagtgtccgcatttctgccttgattaggaatcccctgattggaagtgggctcctccttttgggactcctccttttgggactcctttccttctctctgcccattgcattcgcgatttccatctgctccaactccaaatacttttttgaccggactcgaaattccatcaacgattttactgggtctttgtatattgacttagccaaccgggatgatcaattcaacccggccaagatgaggtgcatgtgtactttttcctccaatccctgtacttgcaatgctgcatctttgaaatggtccagataactctataacgtttcgccgggttgttgtcgtattttgccaagtgcgaattcgaatttcggttgttttttgctggttgcgaagttcagcaaaaacctctagccaaatcttcaaaattgcggattgaccacggtggcaacgtatggaaccatgactgggccgctccggataaggtagttacaaaaatacgggatattattggttcgccaattcctcacacacacatctgcatatcaaattcatcgatatgtacttgtggatattggcttccgtcatattttgataaaaaaagaaccatcaaaatcctccaagtatcggacattaacaatctcatcagtaaaaggactattgttgtgttgtcctctactgtatttcctttgatacactcccccttccatccttatccgaggtgcaacttgaacagcaggattctgggctatcatctgagcttgtcctatctgcttcatcccggcgttggcaggttgggttggagctgccggttgtgcatgcatcatattttcactatcttgatgcaccgggttatcattttgaatgttctctcaagatgaatccccgatttcaaatcgactaaccggtctttccgagttaccgggaattacatgatttttgggctctgcaggacaatttgttggaaaaaccagaacttgactggcctggtaatttgtcccgttcctggcgatggctgcatggctatcctgctatccgtgatcctcaatatggaccgagttctccatatttctgagacattgttccatgcgttgtatgcactgttcttcttcacgtttccactccgcattccattccactatctggatatttctgatatcctcctacctttgaagagtatatcttctctccatactctccattcaatcaaggataacatttagagcgttattcatgagatgttcagtaggttatggtgccagggttggttaatgagtgtcaggaattgcccgtcctgcttgagcaagagacgaagctgaatctgaaaccgcatcactcacatgtacagcttcgtgacggaccacgttctggttaccaggctctcctctttcacctacatcggaacgtgggtgtggagtctggttatttttagtgtttaccatcacggatcgtgggatttgaactttacagtccccatagacggcaccaatgttctgtcttttacgaatagatatgtccaacaaggatgctggtgattttgatattggatcaaagactctctcggaggcatctattaaggaaatacctcttgaaatactgatcactacatccccaaatactagtcaatggaagtgaggtgtgtgcacagtgataatataaaagttaggtcgagagaatgtgcacctttctccatgaatgtaactcctatttataggcaaattacctttagactaactgatgccacgttcctgttatataggctgaaatctttctatctgttgagatcacattccttgtttgttatgactctttgtggttattgtgagtataagttaaatcttattgttaggattctaacacgtaagatccttaatgggcctttcatggattaacaatgctgagcccatatattaaatctgtaacaggtttgttacgtgaataattagaaaaaaaattattaaaattaatttaaaaaatgtttatataaataatttacatattattttttatgaaatttaattataaattgataaaataaaaatgtaaattatttaaaataaaacatataaaatgatataaaataaaatttcaaatatacaagaattaaatatttttaatttataattttttataatttgaaaaaagttaatattttgactaataatacatagaaaataatgttaacgggacaaaataagtgttttggtaatttattcttttatctataaataaagtatcataagttcaattcctatttgatactttctatttttcattttatttcatttttttacataagcgtaacgtcaatcatctacataaacttcatctcatcattaatatatcacatcaaactcaatgttaactttggatgatcaaataaaagaaggaataaaattacttattttgaaaaaaaataaagaactaaatgttttgatttagaaatagaagggctaaaattacaatttaacgttatttttatcctcccatcctccaaagcatgcactctcataattgatgtacttttcaggggtgtgcaaaaattagttcgataaaaaattgaataaaatttcaaactattttaatcaatttgattttatatctaaatagttaaactggtttgaaaatcggttcaaaatcaaactgattttaaaaaaattagttatgaacaaaactgattttaagagtcgaatcaattttgaactaatttttaaataaaaaatattcaagtaaaaactagtttgattgactggtttggtttattgaaacaattcagttaaacaaattgattttaaaaaacaaaacgactcctttttttcttgaattaatttaaaaaaaccaatttaatttaaattcgactagtccaaagggtcattttgcacacccctatttttcaaccctttttagaaattcttaattagtttgttgggtgttttagcggcaaaaatttaaaaataatacaatttaattcaacatttaggaaaatggggcaacttggggaatatttaggcaaatggggcagccaaacatgccctgcctaggcgtgtttaaacacgcccaagctaggcgtgtttaaacacgccctggcaaggcttgtttggcccccttttgcctatatgtacccctgaaagcgacattcggtccttcacgccttctctctagaattagctctgccttctctctagattttgggtgttgatttgtctgaagcgaagccctgctgaatttgaagcgctgtcacctagtaagtccatttaactgattgtgctttgtcattaatttgttgtatttttaaattagaaaattgttaggatcatatgaagttgttagcgacatatatattaggttagtgagtagggtttgaggtgtttcattttagtttagggtttacgatgtgattagggtttagggggtgattagggtttaagatctgattagggtttagggggtgattagggtttagggtgtgggctagtgattagggttacgttattcggtttagattagggtttnnnnnnnnnnnnnnnnnnnnnnnnnnnnnnnnnnnnnnnnnnnnnnnnnnnnnnnnnnnnnnnnnnnnnnnnnnnnnnnnnnnnnnnnnnnnnnnnnnnnnnnnnnnnnnnnnnnnnnnnnnnnnnnnnnnnnnnnnnnnnnnnnnnnnnnnnnnnnnnnnnnnnnnnnnnnnnnnnnnnnnnnnnnnnnnnncaatttatattagggtttaagatctgattagggtttagtggggttattagggtatagggtttaggctagttattagggttacgtaattcggtttagggtttagggtgtatggtatatggtttggggtatagagttagggtttgtgtgttactatattttggtatagggtttaatgtatttgatatataacaaaattttggtggaatgattttggtaatccttaatattttgtttaccgtggttttaaatttttgttcatgaagatactgattagatggctgattcgtcctccacatcttcatcacgttctgcatcggatcatgaggctgagccgatggatcccactgcctatgttgtccctaccccatacaagtagggcgttctgcgtaggcgaattcagtgcacgcacgtttcacaagttgtgtggaacggttccgtgccacctcgggtattgaagactcgacgtggcaaactgggtggtggaccacatgcagatgatatacctgatgttgtttctgacatgttgcgcgaccgatctggaggtagcgtggtcgcagcacgatacatgtcgttgcttgcaggggatttttcggacatcggtcgatatagctggggctccgctgtactttcacatttgtttaggcaaatgtgtgagtgcacagatccagacaggagtgacatcggtgggtgtcatatgcttcttcaggtgtgggcgtggctcagatttccaccgatcgccccagctattccgctgcccacacagccggactggcatttcggacatcggtatgtgttattatatgttgttttttttttcaattgtagcaatttgttgtcatatggccgtatcttctcccctcggcgtcatatgcacgagtccacttttccttaggaatgctgtcaatccattctgcaacctcagggctggtattgcgaaatcgttcatacgctatgtcaaattcggccatacagggagtataacctgcacaattaaaaaggcatgaacgttagctgggtaagacatttttaaacctgactaaattacaaataattttgaacatacccaaggtcatgaggctcttcttcaatcttgcactcttgaatcgttgattgaaattactggcaatatgacgaaggcagaaaacgtgatgcgcaaagggtggttgccaaccggcatgattctgcactgcagatataatgctccggtgccgatctgaaatgaggcatatattttgcatttgggttacgtggaagcgaatgttagcaaggaaatattcccaagcttccaacgtctccccctcgacaatggcaaatgccagtggcacgcattcgttattcccgtcctgactcgtggcgatcagcaattttcctttgtacttgccatataagtgagttccatcaatttgaatgacgnnnnnnnnnnnnnnnnnnnnnnnnnnnnnnnnnnnnnnnnnnnnnnnnnnnnnnnnnnnnnnnnnnnnnnnnnnnnnnnnnnnnnnnnnnnnnnnnnnnnnnnnnnnnnnnnnnnnnnnnnnnnnnnnnnnnnnnnnnnnnnnnnnnnnnnnnnnnnnnnnnnnnnnnnnnnnnnnnnnnnnnnnnnnnnnnnnnnnnnnnnnnnnnnnnnnnnnnnnnnnnnnnnnnnnnnnnnnnnnnnnnnnnnnnnnnnnnnnnnnnnnnnnnnnnnnnnnnnnnnnnnnnnnnnnnnnnnnnnnnnnnnnnnnnnnnnnnnnnnnnnnnnnnnnnnnnnnnnnnnnnnnnnnnnnnnnnnnnnnnnnnnnnnnnnnnnnnnnnnnnnnnnnnnnnnnnnnnnnnnnnnnnnnnnnnnnnnnnnnnnnnnnnnnnnnnnnnnnnnnnnnnnnnnnnnnnnnnnnnnnnnnnnnnnnnnnnnnnnnnnnnnnnnnnnnnnnnnnnnnnnnnnnnnnnnnnnnnnnnnnnnnnnnnnnnnnnnnnnnnnnnnnnnnnnnnnnnnnnnnnnnnnnnnnnnnnnnnnnnnnnnnnnnnnnnnnnnnnnnnnnnnnnnnnnnnnnnnnnnnnnnnnnnnnnnnnnnnnnnnnnnnnnnnnnnnnnnnnnnnnnnnnnnnnnnnnnnnnnnnnnnnnnnnnnnnnnnnnnnnnnnnnnnnnnnnnnnnnnnnnnnnnnnnnnnnnnnnnnnnnnnnnnnnnnnnnnnnnnnnnnnnnnnnnnnnnnnnnnnnnnnnnnnnnnnnnnnnnnnnnnnnnnnnnnnnnnnnnnnnnnnnnnnnnnnnnnnnnnnnnnnnnnnnnnnnnnnnnnnnnnnnnnnnnnnnnnnnnnnnnnnnnnnnnnnnnnnnnnnnnnnnnnnnnnnnnnnnnnnnnnnnnnnnnnnnnnnnnnnnnnnnnnnnnnnnnnnnnnnnnnnnnnnnnnnnnnnnnnnnnnnnnnnnnnnnnnnnnnnnnnnnnnnnnnnnnnnnnnnnnnnnnnnnnnnnnnnnnnnnnnnnnnnnnnnnnnnnnnnnnnnnnnnnnnnnnnnnnnnnnnnnnnnnnnnnnnnnnnnnnnnnnnnnnnnnnnnnnnnnnnnnnnnnnnnnnnnnnnnnnnnnnnnnnnnnnnnnnnnnnnnnnnnnnnnnnnnnnnnnnnnnnnnnnnnnnnnnnnnnnnnnnnnnnnnnnnnnnnnnnnnnnnnnnnnnnnnnnnnnnnnnnnnnnnnnnnnnnnnnnnnnnnnnnnnnnnnnnnnnnnnnnnnnnnnnnnnnnnnnnnnnnnnnnnnnnnnnnnnnnnnnnnnnnnnnnnnnnnnnnnnnnnnnnnnnnnnnnnnnnnnnnnnnnnnnnncataccgctttaacacaaagtagacaaccaacacttctacagatgtagttactcccagtaaatcaccaaatggtgaaagaaagtcaatattgtcaaagacacaaagtcataaagaagtggtcttgtttacacaacaacctagaccctaggtctagtcacgccaacccatacacccaaaccaccacatacgccttcaaccctaccacagatcccctaaaccctagttgtgttccccctatcctaacccctcatcacaatataaaccataaacacttaagccggaaaccataaaccctagctctgtaaaccaaaccctacaccctaatcaacacacgcaccctaaacctttaagcggtaacacttaaaccctaggtgtgtacaccttcagccagaacacttaaaccctactcaccccataaaccctaatcacagtatcaacactaaacgtaaaccttaaccaaaccctaaatccattagcctgacgtctataacagcagatcttaaccctaatcagagcctacgaccctacaccctaaactaacacccacaaaccctccctttgtacccctactcataaaccctaatccccatgtacacccaaaaccctaacacaataaatcctaatgacaatgtaaacccctaacctaaactgcaagccatcaaccatacgtttgtacctgtacacctaaaccctaatcacgacatatgccctaaaccctaaacctacatatgtcccccaggccgtaaaccctattaacaatgttaaccctaatattaacctaaattatgtaaccctaaaccctaacccctcatcaccatataaaccataaacacttaagctaaatccctaaaccctagctatgacaccaaaccctacaccctaatcaacacacgcaccataaaccataaagcggtaacacttaaaccctaggtgtgtaccccggttcctacaccctcaggcagaacacctaaaccctactcaccccataaaccctaatcacagtattaacactaaccctaaatcctaaaacgtcaacacaacacaccatgaatctaaatcctaaactaaactacaatacctaaaaccctagtcactaacctaatatatatgtcgctaacaagttcgtatgatccaaacaattttcttatttgatagtacaacaaaccaaatacaaagcacagtcagttaaatcgacttacttgtcagcaacgcttcgaattcgacagggcttcgcttcagaggatatcaagacccaagctttagagagaaggcagagcgatttttagagagaaggcgtgaaggaccaaatgccatttgcaggggattttataggcatcagggcagcctaacacgccctgcctaggcgtgtttaaacacgcctagcttgggcgtgtttaaacacgcctaggcagggcgtgttaggctgccccaaatgcctaaatatttccccacttgcccccttttcctaaatattgaattaatttgtattattttaaaaaattagccgtgttttagccatcgaagtgaagaaaggtcatccctctcgctccatctttaactaacataagaaccactcctagctgtaaattccatgccgccctagcctcctattgaaccacatagaactcttcatattaacaatgcaaaggcacctttgtacaaaaatgcatgttcgaattcaatgaggtgatcattcggatcaaccatccgtccttcaactccgtagttggaaattgttgcagttgcttcaaaatatgcaaactcaaaattcgcactaaaaatgtcatgttgaacgaaatcgtctcatcattcttgactccatttatcatattataagcttttgctctaattatcagattccgaataactttggatgtgacaaaattctcctcgtggtcttgacctaattttcttttctcaactcttcaatcaagcgttcttgattcttcaacgtttgttgtgttgtcgcaagagtgtggcaagtcctgcgatcgagtgtaccaaagatttatctccatcttcaggaataaccccgttctgaggagtgacgtgaactattctccttcctcgcaatgcgattatggttgcctagcctgagaaagtgctgagaccttcatcttattccttgtgctcaccatcactaatcattagatctgttttgaacaagaaattgtttaatgatttgaatgaattaatgaaatcgattctcacagatggtcaatattttgaagtagcttcaagggatgagattcggatcaacgaacaccaagtagaatggtggtcctcaagcgattttggttatggcatctataacaacttcgacgttcaagtaaataagtgtatgtggaatggtaaaaattgttggacttttttgtttaaactccatggattatgaataagaggcggttgaaaaaaggttaaaaaaataataactactcccaaccacttctgggaaaggttagaaaaataataattactcccaaccactccgataacaaccagttacgatggttcattgcaagagtcgcgatggtttactgacaacgacaactcttcaacatggttgtttattgtctataaatagatacagagacaacgacaactcttcaacatggttgtttattgtctataaatagatacagagacagtcagaaaataagtagaaaaactaatagagtttttgatagttaatctttttctgatattctcacttagatactagtgcattttcatatcacataattcttcactttttctgagtggttcctcaagcaaagctttgttcgtttgggctgttgatttgaagtgccatcaatcttcagacgttgattcgttctatcctgggagacaattgttcatcaacctttggcatcaattggagggaacaaatttgtcttaaggagacaacattgttgggcttagatcctttcatctctttgcatctgtttctgattcatacttatcatacagaatctgtttgaattgatttttttgtgcaattatagttgattatattgtttctcttgactactcagattctgacccttgtgcaattggatatattccaattctaaattaactaataagtataacaaaaatgagtcatgatgccctcattcgagaaagtccccatatttataggttttcttgaagtgaaagttctttggattgattgcactacacgtgtaggcgcatgtgactatgtatctaataatttgtcacttaggtgtgaatgttgtcttcaattatcccgatatatttgggttaagtgctgatactagtttgaatgtcaacactgatgctctttaaggtggtttactttataacttgggttgattatgataagtcggagtactcctccttaacatgttatccttaatatgttttaagataaacaatgttgacttaaggataaaagtagagactaccccgggtaacgggctttaacaagtgttttatttaactgtattaaatttcctcatttgtacaaacattaacaaagcgtgcacgggtgaaacatcatctcaacgtgacaatatttgtagccacccatgcaatgcacctttattgctttaaacaaaaagaaaatatttacacttaaattctcaacatatgaagaaggaaagaagaaaagaaggagcaaaaaggtgtttttagaaaaagaaaaagagcaaaccaaattaaacaataaatccatgttgtagccttgtatcgcatcactcatctttatcttcatcttcgtcgtaattgaagggtagaggcactgacttgaatgcacggtacttgccaacattgttcaagtgctcattctccaatctgaaagttagaaatgtagtaattataaaataaatcaatcgaacattgaaattatccttgtttttccaaatgatgcatggaatattaatttgtaatacacaagttaatgaaaatttgggaaatataagattagtttgatggttgagaaggggagcttaagggtgaagggagaatgcggaagggagaggtcgtaggttcaaattcctcccaccaatactgttaattgaacaaacttgtatcaaggatttacaacacgtgatcacatgtccagtcaactaactgaactagatagttattagaatcctaattaatttcatgtttacctaaagaagttccatatgccacgacgaatgatctctagacatgcaacaatagtagtcatggcttgtttatgcaagaagctaaaattgaaattcaaaacagtctgcaaccaagcaaatctcagcaagacattaaggacctgcatggtttcaatttgtcaacgcttttattccaattttaaaaacaagatatcaatcataattgtaatacatgttagaaaatttcaagcacagttgtttcctcttacataccatggctaagaaatatacacttttatgagggactgcaagtttatctctcaaccagcgattcttggaacgcctttgcaaaaggccccaatcaattacaaggtcccaatatgtagatgcaactgctgcaaatactgagaaaatccaagccagcaccatccacgccattgaattgttacgactataggctgtcctaaagcaaacagcaacaattgtgaggaaatatttcaatccgttatatccttgcattggatctttctcttcgaacaggcgcctgagacactgcaacatattgaagaagcttttgtttaacatttcaaattttattgataacagtttgagttcagcaccaggatgcataaatacaggagatttgtccaatataggtatttttttaaaaactaaataccactttgaaatggtcttcaaacaatttattagactaggtgattcctgccacgtaagaaattggtgatgccactctgaagagtattacttgttcaggtgtgtgaatgacttggtgacgccaccctaactagtttcacccaatcaaatacatttttcaaccatgaataatgatcctcttaattaaataatgaagtgtaatataattttgggtgtcagaatattaatctttctacttcatactttggtctaagtaagaggatattgcattacttcttattcacttgcaagaaaaattcaacaaatggatattcatatttcatttctactctgctcttttctatttttaccttcaacaagtacggttctaaaagttgatcaaaatggaacaaatttagttacctgaaggaaacgagaccagtagggaatgacggcaatgatgaatgaaaaagttatgaatacactactagagtcgcaagtgttttctctctgattgaaatccccccagccatagtagcaaatgtacaactcaaaacttctcaaggcttgcacctgatcagtacacaatataggatcacaatgttattatataagagaaaaaaccataaaagaaatgataatccgtggattatttttttaatttggtaacatacctggctagtaaattgatctgccaagaagaaatccgggagtgtgaccttaaatacatgtaaaataacaagtgttagactatgcttgaaaattaggaaaatgcaaaaaacaatttgtttgcaggaacttttctttaccttgtaaagaggagcacatatgcagtggaacaagcatatgagcaagaaaaccctgcttgagcgataaaagatgtttatgggacacaatgaaatagcaatcacaacctgcagaataataatgaatgaattcataatgtacttcatacttcagtaattcttaaaatatttaatggcaaaatctttcaaacatagaatgagtcttttatttttttttttaaaaaaaaaactttaaaataagtattttttatatgcgcttttttagtagataaaatttgttttttaaaataaatagaaaattattttttttaagcagaagcaatttagacaaatattttaaaaaatagatagttacttattttattaaaagaaacgcttattttaacaaataactttaagcaaactggcccataaactccttacaagcaacaagatgagtggaataagttcagtcaatgttttgtaatcttttgtatgtggatcaatctgcatgtctaggtttacaagcacgccgccgagggccaatactgctagactaaaacctaggagaaggacttgattgtagcccaactcagtgccttgtttaaaaccaaatatgaatgagtgattcactctgtatcgcctccagaaataaatatttgcagcatacatcagcatgtgtagaactatgtatccatatagactgcaaaaatgaaagtttaacatggttactacttagtacatatttggataaccgttcgtatctttgagtactaattagttttttgtactctgaaaatacttttggaaggaatgtaaggataattcaaacataactttagtaacaatgttgtttccttttccctatgtagattaattatctcctaatgttggttttggtgggggctcttgtacccaaaattgactaatttgtgaaatggattcttgttaattaagatgagcatgaccaatggaaaaattacctgttcagtgggaacaaggtatccatgtacttagtactccctgagtcatccaatattttacgagttcgaacgattagaattagggctagcacaagagctgctgtgcatcctgctaagaaacctgtgaatatgatgacagtgtcaacagaaagaagaagtgagatcaaaatttgtcctcttttctcagcatatataataagagtttatattatacatgaatatcttggtgcttacccattgaaaatgtaactctgtgtctttctctctttgcctttggtcttaagatattcatggctttattacgatttgagttgtaaaagtgcttagtgaatgttttttcaactctatccatgagctttgtgacctgccatagaaagtgtcaagtaatttgtgaccaaaagcattttgaaacttggtgtttatgcattaacaatgtcattcaatcacaaactgtcacgacaactatcttaaaaatttcatatcataattttttattttttgacaaaatactaaaacttttacactgatggtgtatagaaactaaatttaaaagaataacgaatctcaatgcgagaccttctttttagcactctcacctcatcagagcttccaaggagggagttgtccaccattttcatataagctttagctgcatctcttgacgtgatctgaatcatgaagttattatgtcaagtgatagtacagagaataaagtttaaatgagtaaaatgaagtgaagggtaattgaattttcaccttatcatatttcttcattatctttgaaaatgccaatgtattcagaaagctgttaatttcatgaaaattattaattagataatcactaataaggagcgttacaaacatgaagtaattcatcatacacttgcttcttacattacattacctatagcttttcagaagcctaagcttgcggtagaattcaatgaatgaccgttgaagttgttcctcaactttgttcaaattttttctactgaaatttagttctgcattgccagggaaattgagaacacctttgatagttgaacgtggagtttcaaaggtgtgattcaattgcacacgatcaagtacttccaaaggagctggtctagtacccctgatattctttggcttctgtaccgcaacttttggtattacagtttgttttacatgttcttcttgatcatcatttgaatcatctgattgttcatgatgagtgctaccctcttcaatcacttccatggccatggtaacctttcctgtaacaagcatataatacaattaaaacttgtactcttttcttactttcaatacacactaaatacagattgacttgttgcaagggtatctcaattttattaaaaaatagtttatttttaataaagaccacatatatccttcataagaagtaactatgtttaagtcaaataaaattatcctaagagggaaacttctctatcaaacattgaacacaattacttgctcataattcatatttaagattattaattaagctagaagtattcattgcatattcggctattaaaaaaaacagtttaataagttaagatacgaatatgtaaaaagaatacaaaacataattatctccttcaataacaattttattgttagcctaatgttatttgaatttttaaattatatgcaatcttatttataaattttattatttaacttttatcatattacaaattttattattttagtttttttcgtgaattttnnnnnnnnnnnnnnnnnnnnnnnnnnnnnnnnnnnnnnnnnnnnnnnnnnnnnnnnnnnnnnnnnnnnnnnnnnnnnnnnnnnnnnnnnnnnnnnnnnnnnnnnnnnnnnnnnnnnnnnnnnnaaatttaaagaaaaataaaatgacatccttttgtaactaatttttgcaaaataatatcgttttgttataacacaacggtaaaatatgaaaaataaaaaatttgattgtaacaataaagtaaataaacttggaaaataaaattagtaaaatgacgaaagttgcatagtaaaatttactattaaagtcttatatgcattaagaataaaagtaaggttaagtttgaaaatatcttatgattaccgttgtgaaaaggttaactaaatgaataccgttgtacaaaataagttttttaaatgatattaaattgataaagaaagtcaaataaacaaatggctttcatcttcagcaaattaaaattctcatgttgattgctaatatttaaaatactaataataaaaaggtcaagttcaacgaaattaggagacataaataaatttgttaatgaaaaaataaggagtcttacaggaaaaaatgaatctgttttaataattaatagacatagaaaagaaagacaagaggaagaacaatatttgtagctcaactaactgtttaattgcaaaagacttttaagtattgcgtcaagtttatgagggggaaaagagaggttcaagagtgacttaagtataagtaaccacaacatggagtataataaacagcttgaatgaagaaacaaaggaataaaggaataagaaggattcaataaaaatacgatatcattaagaaattattaatgaatttttattacactatatcaaccgtgtaaaaattataaatttatatagccatctaataataaattatcacatataaaatgattgttaattttttaattataaaaaatttaaatttatttataaaataaattttaattaaatgatattgttaaaaaatttagtgtgcaannnnnnnnnnacatggagtataataaacaacttgaatgaagaaacaaaggaataaaggaataagaaggattcgataaaaatacgatatcattaagacattattaatgaatttttattacgctatatcaaccgtgtaaaagttttaaatttatatagtcatctaataataaattatcgcatataaaatgattgttaattttttaataataacaattttaaatttatttataaaataaattttaattaaatgatattgttaaaaaatttagtgtgcaataattaattttttattatacatggcaaaatattcataatatataaaagttaagatatagggtaaacaatatagaatgaacgtattgattgtggcataaaaaaaattaaaattatataataacgtgtcaaaactctgtatatattataaaagtaaatctacaccccttcaagtaccacaggctattgccccttgggtttttccacggtccatcaaatataactttagaagcattttgtctctaaagtttccttcaaataaattaagtaaactatttttttgttacaataaagcaaactaacttaatcatatattaaatatgttaatttacttattaaaaaatattgtttctacaaagttaatcggaccaacccgttaacagcagcgtttgttatgttgacaaaaaaaaagcaccttatgttactaaactaccaacaagataagcaatgaccaacatcatacattaataacaagcactttcttcacacgtaattgaacagaaaataattaataacaatgaattcacacattaaaaggtcttcataatctaatataactgttaattatgaattatttttataataattatattaaaattatattttagatcatttgtaatcaattgataatataaacatctttatatgttatatcaaaattaaacttattaaaaaatattaattattgttataactacccgacctaacatgatttcgcaattaatttataatgtcaaatcagttataaaacatctaataaaaaagcatgaactaattatatattatcatgtaatctcaggttatttttattaagttttttttaatagtatttgttttagagtttaataactatgtgtgttttcttataaaaaaaacacatagctatgtgtgttgttaattttttaaaaaataccccgtcaacataatttaaaatcattttatactgtactatataacatattttctattttttaataagtatttataagagaagcaaaaaaaaaatataaatatttttaataaactaaaactaacttttataaatttataaaaaaaaactctcatattaactttttcaaaattaattttaagctatgtataaactgcataattttagttttgaagaaaaaagtttaacttttttttgttgagaagtttacccaacacatgactaagcatggattatttaattcgatgggcatttatctctcaccaaataaacaaagcaaatataaaaatcaaaaaatctcactaaattacttgagtaggatgtgaatgtattgtaaatctctcaatattttatttaatttctacttataatatatataaagtaatcaataagttgaagggttgaaaaaaatgagttactgttcaatttggctcctttgggtgtggaagctgacaacacagcagatgaagaagcaacatcagaagcaagacgagtcatctcaacagatcgatcaaaggacccagttgggttctcaactttgatcctgaaagcgatcaaagcatccatttgcttgttgagcatggcagcttccttcatcacttcctccacttttgatctataaaacttgcccactttgttgaactcctcatcgagcctcttgaagtacaccaactcgtattctccaccttcttctgaagtcataaggaacgtagtttggtacttctcagagccatcatggttgttcactgattgcaccattatgggttggttctctatgtcttgttctgagggactaagttgttggtagtgtctttgctgtgtgaggccactgaaggctctgtatagtgttagctttcttcttaggcctcttggagtgactgtaggaggcttggttctttgtctgatacgttggatttctttcaaatgggatttcagaaaattgtaatccatgtatgcttcttgccattctggcaccatttgggatgtgtattctttcccaaacttcattgcctttgaatttgattatgtttgttgcaccaaagatgtgtatgtaagtatcaaggttttagatattagtcctggtcgcgtttgttgatatcgcggcagatcacaaacaaaaaatgcggttgtgctgcactcgcagccggacagttaaaaaatcttaatgttgcagctagaatggtggtcgctggcggttttttaagatcttgatgtgtgtatgtagagggtgatttattagagtagaaacttttttgagatatgatatcaagagaggaggtgtaaagggaaataatagatagtgaaagagaatggaatagagatcacgatggaataggttgctatggatgctgttatatttatatgaacaattaatattttaaaagaagtgacggtgggtttgatagagttggtgaggtaggcgtggaagactaattcagcgttgtgtttaattaattaagtggaaaattagaatagaaaatagacaaaagggtacacactaggcatcacgttaccctgtcctttgggaccaaatcggaaagttagtgctttttatgttgtgtttttaattatgcaccaagaaaaatagtgcaacaaaggaaaagttgttttgattttctaggaagaagcggtttgtggagaaagaagatatggcttcttctttttgttgggtattgcgttggtaaactttggctcactcttgccttatctaccaatatggctggatgtatgtgtgacacattattattaaagaaaaataatgtttatatgttacacatcattttgttatctgatttctatattaattgttattattaaaaaataaaaagtaaaaatcatctgagtcattgacaacatcgagttaacaaaaataaaagaatcttctaaacttataataataaaaaatggttgacattgacaagtacactactctatgtaaaataacaattgctgaccgtgactaatggcccttggataagtgtgaacaatagatgtgttcacttaggagaaagaaaaactaaacttcgtgttggtttgttctgtttgaacgaatcgaaatatcagtttgaggggctgaaatgggtgcaatggatgtgaaaaagtaaaaattcttgctttacacgtaaaaataccgagtgcgcacggtacggatgtacgatcgagctcgatcaaaccgagaatgtttctttcttcgtcctaaaagtctttggttcatgattgataagttgtaactttcgactcaacgaatatactgccgattgtgtaaacattttttattagtttatttttctaataataaatgtttttattttattgtttttaaaataatatgaaacaaacacgcactaattggaggatgaagtcttttacaacaatacgtcttataactattgttagtgggacaaaggatggaatgttaattatttttgcaatacacaaaatagcaaaaatatacattgtcattatcgtggggtcactgtacatgtatctgtccttcatataaccatgctacatgcatgtgtctgccctccatgtcagttatgctacaggagcgcaaatgtcaaccttcatcaacgggtcttatcaactaacaaactatatattaaacttgattattcaaataagtgtaacaacattatttccttacagatttcatattatctacaaattgttacttatctatcaacaaggtacatattatctactatttgaagtatataacaacacataattatctatttatcttatcaacaaattaattaacaacaaagacacaaggcccaaggctcatactctacgctataaatacatgttctatctaacccttttacacactcatacacaccattattcacccacggtgaacataccctctccgagacaagcttggaagtacactttcagttaattaattagctctacctaccagacattgtgaacaacaggattcaacttggtcatctttttccaagaaaggtctccttattcacggccttttgatggagcgtctcattctcttccaagatcgctaaactcctttgaagaaagagcattgcagaatctgtagagcgttgaagaccaaccgaccgtattagatttttatcaaacgatgttggagtctttcgtttaagcatatgcatccacaaagagtcaatctcctttgaatcatgcacgaactcaagggaggtgaagggcgagaggaagaaaaaggcaggacagacgcaggcatggaaggagctggtagaggaggaggtgcaggaattgttagcacaacagccttgataggagcaggaggaggaggagcctgaatggccataggggccaccgctggagcaggggtagcagtgtccggagcaggagcagcaacaacaacaagtgtcaccattggagccggagtccagacaggggatggcgaaacaccaaaatttggaagaagcccagcagcttttgctttgctttgcttaattcctttgcttgcacaaggtttacttctattatcccttcaggcttcaactcaaaattactgaacaagaaaattaactgaggttcaaaatcaaaacctgtgatttaaccagatgaaaccacaatgctctcatcattcagagacacaaactcatttgtattgggttctattattcacgactctacaagtgttgtcatcattcagagacactaacctttggaaatatttcttaaccttggacagatgcggagcttggattgggagatgaggccgcagcgatgaggttggaagaagtaggagatgaatggaattggcgctctgaagggaccctccatgcagccccagtgcctgaacttgtacacaatcactagtggtccagaatacacatgcagaatttccaaagcaaacccacgtgggaatgttgtcgtgaaggccttatgggatgaatctgttgtttcttcatatgggttgtatggcctcagtttctctggtatagaggtttgcagcagtggaatataccctccaccaagcttccttttctcttcccatctaataggcttccttcctatttataatcacaaatatgatagaaatataagatgaattgaatagttaaaaaaaagaaacaaaaaaaaaaagtcaaaagttagatctcctctctattaataaaattaatattataaagtaatatttttctattaaaaaaaaatcacaaacatgaaacaagctagtaatacttagtaactaatatgtatgaaattcaaaccatgtaaaatgaagattgagtttgcaattctgctttctcaagacaaaatgttaccatttaggctgaaagtgtatttctctgggtccactgatctgttatccttgaaatccaccttgtggaatatttccatctcccaattcttcactaatgtctgcaccttttcttcaagtgaacccggaggccatacttgtccttaaaaacataatcaaattatttgatttaacgtttggcatgaaatcatatgattgatccatccgtcagcctgacccctcacagcttcacagctccgctgagtcatgtttgactctacaagtggttgttgttgctgtagtgggagcatcgatgagtcatgcttgagtatgtccacgaaccaaatggaattatggattgaagaagagaacccatttggaaaatttaagaaaaattaacataatcctgacaaccaaaaggggtcttaaataattttaaaaaaatacaaagagaacccaagaatcataaaataaaataaatttgggggtaaaacccaaagggttaataatatttacaaacctgagccccagttcaagctctcacgcgcgaattgaccatgttgggtaatcctttatttgcatgaaagacaagctttttaccctgaaactcagaagaagaggaccaacatcttgtaggtgcaaccattgagcctccgatcccacttcttgacgagtgaaatgcagtgttcaaagtcctttttggcgccgaagaacccaacggggatgttgatggtggagatggagctgcggacgacatggcggttcatgtcatggaggagcgcgcacccctggttgaacagtgcgggattggtggatttggagaggatgaagaagaggcaattataggtggaggactcgtggcggaagctagggtttaggaaggagaaaaattggaaggctcggagggcaatggaggggtgtttgagggcctttaggatttcagagcctttgagaggggtgagggagagggagagggaggagaggtagtaataaatgtcggagaaggagtcagagagggtggtggagggggaaggtacaagggagtcggagagttagagggagagtgaaacgccccaatccgctaatcagggtcattaccaaacatcaaccacaatcacagataaaatcagagtttaagcagtttggaagcatactatatgagtgacatcatcaaatgtcctctacctacactgtacatatcgtatggtgaatatatatacatctctgttttatacaaaactatacaaatatcccttcagggtacaacaaaaacaaaaccaaaggctacatacaaaatagcagagccacaggctcatatcaactagcctaaggtgtgtagtagcagctatctctgcctaggctccttgcctcgggatctattcgcttctcctgagggatcacctgtaaaaacatagcccacacaaggggtgagatataaaatctcagtaaactcagggcccttgaaggtatttccttcccctggttcactgaccactattatacattacatacatatcatcaatcattcacatcattatataacatccatatacatgtatacacgcataacagaaccatcacaagacaggcaaacatcagccatatatatatatacacatacaaacatcacatatcagtgtacttcaatacacctccatttttccataccagggtacacctatggtatacatccatgcatcacaatcccctagcatagggtacaattcacatcctcaacagaacaatcaatgcatctcaatctccctctcatagggatcagaacatcatcatacatgcatcgaagactacatctacataacgggaatacccctcatcatgaggctgcatctgcaatataggaacttctccaggcaagaggctacatctatactgcaggatcatctcatgtcctatatcaacataatcctgaggagactacatctgtggatataggaacatctctacactaggaggctacgtctatatcccaggaattatctccacatcaggtaccactcagctggcctgaaaaacatctctccgctcaaaacttagcacataaggtctgaggcatttatcatctcaagacttcacaatcatacctgaggaatctgacatttcagacttcaaacatctctgtctaaggaaacatttatccttaggactttaggcggagagcagtggcacctcccaaggaatctcagccattccagggagtcctcaaactcttcctctggctagggaaccttaactagcccgatactcatgcagtatcctgtaggttccatcacagatcattctctgatctgcatctcatcatctaccctgaggttcatcatataacatcaataaacagaccacaatggcctttctcacaacagcatgcacattatacacatatacatatcagcaaacatggcatgcatcctcaccccacatgggtggcaaacaagagacagggaataaccctcataacgatgagcttactcatccacatatcatctatacaagcagannnnnnnnnnnnnnnnnnnnnnnnnnnnnnnnnnnnnnnnnnnnnnnnnnnnnnnnnnnnnnnnnnnnnnnnnnnnnnnnnnnnnnnnnnnnnnnnnnnnnnnnnnnnnnnnnnnnnnnnnnnnnnnnnnnnnnnnnnnnnnnnnnnnnnnnnnnnnnnnnnnnnnnnnnnnnnnnnnnnnnnnnnnnnnnnnnnnnnnnnnnnnnnnnnnnnnnnnnnnnnnnnnnnnnnnnnnnnnnnnnnnnnnnnnnnnnnnnnnnnnnnnnnnnnnnnnnnnnnnnnnnnnnnnnnnnnnnnnnnnnnnnnnnnnnnnnnnnnnnnnnnnnnnnnnnnnnnnnnnnnnnnnnnnnnnnnnnnnnnnnnnnnnnnnnnnnnnnnnnnnnnnnnnnnnnnnnnnnnnnnnnnnnnnnnnnnnnnnnnnnnnnnnnnnnnnnnnnnnnnnnnnnnnnnnnnnnnnnnnnnnnnnnnnnnnnnnnnnnnnnnnnnnnnnnnnnnnnnnnnnnnnnnnnnnnnnnnnnnnnnnnnnnnnnnnnnnnnnnnnnnnnnnnnnnnnnnnnnnnnnnnnnnnnnnnnnnnnnnnnnnnnnnnnnnnnnnnnnnnnnnnnnnnncccagtgtgtcttcccacatgtagcacatctgggagctggacctggtctcggtggtctatctctctggctcctcttgaatctatttgaagaggaagcaattctcggacctctgcccttgcccttctcggctggacctgcaccaccaggtctcctctcatcaggtctgctagaaggagcagaacgactgccactccgtcgcctgatcatatcctccacctgtctacactgtctgaccaggctccccaattctctggacccactgccagctatcctctcctcaatatcctctctaagtcctctctggaacttagctgcaaggacatcagcctcaggtaataccctcctgaaatgagcatatttggctaactcattaaatttagccaaatactcatcaactgtcatctggccctggacaagagtctcaaactccgcctgcttctgctctctggcatctctaggaaaatatctgtccaggaactgggcctcaaaagcttgccaggtaatggcctctccttggcccctcatcagctctgatgtggtaacccaccactcatgagcgtctccatgaagcatataggtggcatagagaagtctatgatggtctgaacactccatcaccgtgaacatcttctctaatgactgcaaccatctagccgccaccactggatcataatctccgtagaacactggaggatcatgcttacgaaaagcggtaagcattcgtcctctagtcacagtctcctcatccacaggtgactgtgaaggtccacctctggggtggctatacccctcagcatactgactagctccacctatctggcgactatcctcgccctcaggaatagggggtggaaaatcatctctacgctgagctctcaactcagccatcaactcctcattggccttcatcaactgctgcatagcatccaaggcagtggccaagggatcagggtgttcctctgcacccacactctcattctggttccgggtcctcaccatggtactgcacatatcacataaaaagggtgagttgatcaggctcactctcaacagttacacatgcaattaccataatgaacaccctagctcaaccacacataacacacaattcaccatatgtacagtgctttcctaaccaaaactgctctgataccataatgaaacgccccaatccgctaatcagggtcattaccaaacatcaaccacaatcacagataaaatcagagtttaagcagtttggaagcatactatatgagtgacatcatcaaatgtcctctacctacactgtacatatcgtatggtgaatatatatacatctctgttttatacaaaactatacaaatatcccttcagggtacaacaaaaacaaaaccaaaggctacatacaaaatagcagagccacaggctcatatcaactagcctaaggtgtgtagtagcagctatctctgcctaggctccttgcctcgggatctattcgcttctcctgagggatcacctgtaaaaacatagcccacacaaggggtgagatataaaatctcagtaaactcagggcccttgaaggtatttccttcccctggttcactgaccactattatacattacatacatatcatcaatcattcacatcattatataacatccatatacatgtatacacgcataacagaaccatcacaagacaggcaaacatcagccatatatatatatatacacatacaaacatcacatatcagtgtacttcaatacacctccatttttccataccagggtacacctatggtatacatccatgcatcacaatcccctagcatagggtacaattcacatcctcaacagaacaatcaatgcatctcaatctccctctcatagggatcagaacatcatcatacatgcatcaaagcataacaggaccatcaggtcactcaatcatccatcatgcgcatcaatgcacaacacctgaccacaatcaggttatacacatggctcactgccaattagcacatcaatcagccaccaaggcatattcatggcatatagtcattcatcacatcaatcactgtcatgaggaggctacatctaagtatataggcacatctcctctcagggaggctacctccatatacccggcacatctcctgcatgaatccctggcggaggcttcctctagatatataggtacatctctatctcgaggcttcgtctatatatcaggtacatctcctttttggtgaggctacctcgtgtacataggcacatccctggccaaggggctacctctatgtatcacgggccatctcatcctctatcatcctaccattgcctggggaggcttcttctgtgtatatgagaacatctccccgtaggaggctacctccatatcacaggctcatctcacaccaggtctttctcaatctctatcatctatcctactacaataggataccattcattcaattctagaattcacatatcatccccttatcaaaagggttcatcatacatagaagtcattccctcatcaaagggttctgtcacatacaacatttaatacttccccatcaagggttcagtttacatttcaagcatatcacgccattataggccatacatcttatccccctcatcaaagggttcagctcacctgtcatgcaagtataatcaatgcatataatcccctcatcaaagggttcaattcaaatattcaatcatccatatgcattacataacattccctcaccaaagggtctcattcacattcaatatatcataccctcttcaaagggttctgcatgcattccaagcacatacaatccacatataataatccctcatcaaagggttccattcatgttcacaatcatgtttcactcatatacaatcattcacacattcagaaccatccctccgctaagggcatggcggaacacagcaaaggacacaccatcaaggtccaagagcttacctgctctccgcaaaacgccggcttccccggtctcgtggctaccaccaccaaaagtgtcaggatcacgtcctacacaagcaatcacataccatcaatcacggtcctaagccgttctaaccaaaggaattacaatccttttcaacatcacacatataaccaatcacttcacaagtgattcacggaccctcactaggatccctctcggcccaaccaaggccccagagcctctcctaagactccgctcaggctaacacaagcacatccatgctttagccctaccatgtccgagctcaatcacacaatcgaaatcagctcatggacaacatctaaaccattactagagtattcatcatctactctaaggttcaacataaccatgcactcaacccctttctctatacatgcatacctcagagccaaaatcaaacttcatcaataatgatttatgaaggctctattatcatcacaataaccccctaaatacaagtctcttcatgactttgggctaattccaaccccatcacaaaagggttactattcatgcaaaaaccccaatctcaaaatcaaactgaggagcttgagttttcttacctcaatggcgtcaaagaagaccctaggaccaccttctcgagctccggtgtccttcccacacaatgggcttcagccaatcacaagttcccaagctctctctaggggatttcccaaaatcactcaaaaggggtttttgatggaaagggatgagtgattcaagcttcccaagtgtttctctcacaatcacaagccaaatggaagtgttttgatcaacaaatatggctcaaggaagcttgggatggttaacaatggaggtctagggctggaggaggaagaagaaggcatttctcttccaattttcgcgtttttgggctttaaatagtcactcagcccgacatgcggcgccccaggcgccagcccggcgctccaggcgccaacctccagaacccacggcgccccaggcgccacctctggcgcctctagcgccacattccagtagctctggcgctccaagcgccgcacctggcgccccgagcgtcacattccagtaactctggcgcccctggcgccacctctggcgctccaagcgccactttccagaaagcccggcgccaccggcgccgtatctggcgctccccgcgccacctgggaaacttggcgccccaggcgccacctctggcgctcctggcgccacatcccagaggccatggcgccctcagcgtgggattggcgcccttggcgccatcctccagtgcttctggcgccctcggcaccagacctggcgctcttggcgccgcacctctgtcatggttttctgctgaatgcgccgtttccgatcatctaaacatgattttagccttaatcacagacttaaatacatgattaaaactcagggtattacagagagtgagaaatgagagacaagggaaacaatatataaatatatatatatatatatattaaaattactcacagaagatggttttatatgatacctatagtcatttggaagaaaccaaacatgtgatcatgtagctactgaataaccacgacggtagcaatcaaaaatgtcgttgtattgacgtttcaaacacggttatttgataactgtctttgaatttgccaacttatttacaaaattgtcaccgtgcttcaaacgacgacggttatcctacaaccgacttaaaacacacgtcttaaaagaaccattttgtagtagtgagtagtgacaggttttggttaatttttggaacaaaaagaacatcgggaataattaagttttgtgcctggacatcttgtaattgcaattaattgtgccctttcctttgattgagttgtaatctaaattgcctagtctgactaatttggtgatatttgttggcctacatctctaaaatccttgttaaaggtcatgtacgtagctggtgtagccactgtcaatcaaccaactttcacttgactcactggtgaagaaacaaatagccacaaataattgttcctcctcttgattcacagtttgagctccttcatcgtgctgaattttgttttgacaaattacaacttcatgcaccaagtggttgcatttactgtattttattttttttttgaatggacggtggcccattttgtcacagtgctaacaaggtgactaacttctctttttaccattttgtttattgtgattatttgcacttttccgttgctagcttgacggttcttatagtttaatttttccttcttgtttcattgtagcttcttggctcttggttggtagagcacgttcaaccattcaatcttacctcataagcctccattgttcctaggcatgcttgtgtcaacttccgttctatttaactcataaaacgaaggctgtaacaccccgtaggcctccagtgtattatcattcataatatcagaatcgcgcttaaaactttatttaaaactggcggaagtgaattgaaccgtatttcttgattacattatgtatggaatatgaaaccacaacacacacaatcaacatataatataaacaagcccctgctgatccagtaaacataagcttaaccataggcagataaaccagaacatctcataaagataatcaggaggaatgtcaaatccacatcataaacaagttttatacatacatatacatcatcatttgacactaaccgtgtctctacaaaagaatgagccaacactggccttagcctcacagaccacttcttcacatgagggtatataaaactatacaaagcatatacaaatatatcatgggtgtacacacacacaatgaccctctacagggaataaatcaagcatccaagcaaaatgagcttcccagctctctctactgtcccacagctgagcagaccacgtctctactggggcctcctgccctgagactgctcctctctgtcagaagtgtcacctgtaacaacataaaccccacacggggtgagatatacatctcagtaagctcagggtccttggaggcatctcctccgccctatctcactttccatgacacaaacatagggcatcacaatcacattggcctcccgaccctcataataatacaagcaaatcatcttgctctatgtacggcggatcccatcaacgccaacctcagtgtgagaccggaactcacacccttgccatcccatcgggagctaccccttacgcatggacgcacgtatatggtacctccgagaataggcaatcaaccgcgatgggacacacctatctcttggtcttaagggatcatcatcaccctgggatcatcatcacccatgagcaaaccaaactaggaggtgcgctctcctcctagggaggtccatatctatcttactagccagaagatctatcaacaggtatcatacatgttcaagcatagatgcagcatacatatcattatgaggatgcaacaaccaacaatgaatgcatcatgaatgcaaccatcactccctcggagtgtggtgaagcacacaagtgggaaacatccccagggactaagaacttacctggtaaagccgagctctgcagttctttccctgctctgtggcctacgccactgacaccctcggtgtcaagccctaaacaaggcacataaaacacatgtcacaaccaatttaagcacacaaagcatcagcatatcaagcagtcctcaactgccacaatgaaaggaacctcagtcctttccataactcaaagtcgtctaccctatggttcatcatagcccaacacacactaggcctctcacagaccctcagaggtctatcatagcttaatcatggccctagagtcatcacagactcaatacaagccaaatacaatgagctcaaagctctcaacagctcaataactcagaatacacatagggcttgaacggttcatatcaaacacaagacaccgttcatatagcctctcaggcacatcaaaaccatcaacaaggctcttgcatgtctcaatatcatcaagtgactcaacacaagccacacatgcataaacatagagccaaaaccaaagttcaccaaactacaatttgagagctaatccttcatcactaaaccattctaaacacacttttcaacaggacccatggctaattctagccccagctcaaatgggtcactattcacccaataccccaattcataaatcaaccggagaaactcgagtttcttacctcagaaatggtgaggaagacctctggacaactttccctagctcgggtgtccgtgaatcgacgccgttcctcgccaaactcaagtttttggatttcccttgagaaagggattctgatatgtgcctagcacatgatactttccaagcttaattagatcgttaaatgcatcaatttatatgataaatagcttccttttggtatgagtatcatttatgtgctttaatgaggtattttggtctagattgatgtttagcaggtgaaacagtagagaattatgcagaacagaaggtctggcgccatcaagcctatgtacaatcgggggtacataggctagttctgcatgtggcgccaggagcaccgtgctcacgcctggagcgccaccgtctctggaccttggcaccatcagtgccgggctggcgccaggagccccacagtttcttcagccagcgccatgagcgccattctttctgtatgttggcgccaggagtgtcgtgcttgcgcctggggcgccacaggtcgacagattctgcataatgagggcaaaacagagattgcacatgctactctataaataaggagcctcagcactgaatgaaggagcttttgggacgaaaattcatcaccaaaggagaagaagagagcttggaggttgagttttgggttgaaggggagagggttcttccctcttcccttccccttctttcttgtatcagcactcatgcttctttttgttgtaccaaggccatccatcattaggtttggctagtttccttttgtatttagggcaagcatttaatgtaacttccatttggattggattgtatttaatgctcattaatgctatgttattttactacattttgcttgaatgtttccttctcttctctagacttgatcaacctagttgagagcttagagctagggttcacaatagggatattggggccttagtcttggaactaagtgacttgatttacatcacctagggataggggtgtggacttgcaatctttctagtgcatcacttaatgcttgacctaataaatatcactaagggattagggtattgaaaggggttaaaggattaatgtcactaagggattagggcttagccacaattgaatgaggatgcatgattgaatagctagtgtagatgaatgttgtaatcaatccatgaaggatgctaggattgttgaatgtgggttccctagttaccttaggctacgtttggtacaaccactatccatcttgtatataatgctttatgtttatgtttatgtttacatttagcttttacatttcctttgcccaacaataattctttaaatacctttttgtcatccaacctaaagatacgatttatgatttaattggtcaacaatcctcatgggaacgataacttaacttatcactttattacttgagcgaccggtgcacttgccgagtatgcaacagattctcaatctaaggggtttttaagagaaagagatgaaggattataggtcactagaggtttctcactagtttggtatttaaaggaagtgatttgggtcacaaaacaaggttcatggaagcttagaagctcatcaatggagttctgggcgctggaggaagaagaagaaaggaaatggcccaagaattcgtaaaatgccccttatatactgggcctgatcgacatgccgcgctgatcacgccaacttccagagcaccccgcgccatccgcgccacactggcgccatccgtgccaacctccagaaacaatggcgccatccgtgccaccaccgcgccaacaacgccaacctccagggactgtggcgccatcagccagagagaacgacgcttatagcgtgaacctggcgccacttgcgccagttgccagtgggcatggtgctgatcgcgccacactggcaccatccgcgccacacctctgcactggttttcttcagaagaattctgcagaaatccctaggctatccgcgcggaaacttgcgccgtccgcgccaggactcagggtcattataaaggctcttgatagaaatttgttagatttatggtggcagaaaagaaaataaaatagaggagggaagagtacattgaaatatttgggagaaggaaaagggaggtttaataattaatttatagatcgataacgttttcatttatagaatgtgaagatttaaaacagaaatactaataaaagataaagctatctacaagtgcctaagttgctgctaaattacatgtgtcactcattgactatttggcctttatatatatatatatatatatatatatatatatatatatatatatttatttaacaaactcaaacaataaaagataaagtcatgttcaattcataaagaaatatctaacaaacacaaaaaaacttccatatcattgatgatatacttgtaattatcccaactccacacttcgaaacgttgggagcatgatctcatggtggtctcttctcttaatgctattctagctgccacaaaaggtccttcaacttgttcttttggcttctcttgatagtcgtatacttatagaggttcaataaatatggtatcctgtcatttattgattagtcaaaattcaactattgaaaaaggcacaagaaactctttcatatgtgtagctaaatattcaaaatacaacttgaaacgaaaataataatgaattattgttgacattagactcacctcagggaagactattcctatgaagtggcgtttacttttggttggagctaacatcaaaatccgagaagggagatgaattttcgcacactgcacaaggatatctaacatcataatagattattgtattttcaatggaggaaaatcatgcagtaaatggatcctctttatgttagaattagatagagtacttatgctcatttcagggtcaaaagtaaattatcattagttttgcaaataacaaattttggacagtgtttttatatacaagtatagatgactaaccaggtttttgttcttcagatggtcatgcaagtcgagattgtcaaattgttttaaatataagaacacgtaatctacgggaccacgacaaatcctgcatttaaatgttattggtatatatgtaaggtttgctcacaaaatgaagtgttcatttaagaagtagcaatagtctagtgccataaaattactttattgtatgatcaagagctttctgtggtaaatatagggctatctctagcctacttgaccactcaattgtaagcctgcaatgaacaaaaaaataaatatcaaattatatttgagacaagcttcttttttcttttttttataacttttacccaaaccattgtttcgaagtccctagcttccatttcgaaagtggtcttgtgcaactgtttgtccacttaggctttaatcatgaaataggatccattgtcatttaggtaattaaaaagttaccgatatgaagttaaacttatatattgatagctattgactaanccatttcgaaagtgttcttgtgcaactgtttgtccacttaggctttaatcatgaaataggatccattgtcatttaggtaattaaaaagttaccgatatgaagttaaacttatatattgatagctattgactaaataaagtgatacaaataaatatcaattatagctagctatatttaattaggtaaatgtaacaataagcttttcttaaaaaattacgattgaaaatatatgaaagatacacttacgtcaagggcgatgttgctctcctcagagcctggttcagaagcaaaaacaagggaaaattcataattgtagcttaattgttagaatgttgattgctagaaagtcagaatataagtaacttttaatctcatctaacaaattagctaggccaggaaatattcttttagagattaattgattctaccatacctttacccaaagatgtaattgacgattcttcttgagaagttttccagccaaagatccctggagatgcataagagaaaatataatataaaccaataatttgtgcaaatctctaaacccatataaccaaatttaatgtgaaattgatgtgcatgaattttatataaactcaccaataaacaaatagatttttactatagtaaatagcccacaaacaaatatggatctaaaagaaactagtataagaaaaatttaagagtaacatacaactatgctaaaattgcatgtgcatatcttgtcattatatattgaaacacataaagacatatggttgttctcttaaattatcagtttttcttatgtaataccaaatatagaccctcttaatttaagaactaggaagccattttgtattaaataaattaaatcatatataggagatggatacttgcaaagtttttgcaattatgaaggcatattatatgtgttgatcttatgtcgaataatgaaactagtcaacttacctcccattcgagcaaatagtcattaaaatttgtaagagttgatgggggaggccaaaaatcataaggattaaattgaggtgttattggtgcaggaggaatcccagtgcttggtccaaaagcaattctaccgagtggaccaaacccgatcacctggaatggaagaggtgggcgacttctactactagaactagcataagaaagcattgatagtgatgagtatggttcaacatcgaatgtatttccaattgaatgagggagcatggaattttgagctggtggagcatcccttggatcagcaatgcttgctccaattgttgtgcttgttgaacagtttcccgagtggcctccaactacacctttatgtccttgttcttcctgaacaagacctttcgaagacccttctccaactatgaaagttgatgttgtggatactaccattggtagagttgaaatgccaacttcatcagttgaggcattcgggacagctaggggcagtgggcttataggatcctgatcaagaatttgttggatgttgataaaaagcaaataaaaaataagtaaatgataaaaaaaatccaaaatagaaaataataacactttaaggtagaaagggaaaagatctccagctattctatcaattaaaattttaatataattaaaacgactacacgtacaagtctgtcatctttggcagcttcaatgatttgcttcccagtcatcataattgagaataggtcttctgaaaatatcaaaacaaaatgaaaggaagagtgttttaaactaaattggcatatattaattgaaaatgtaggataaaaacggacacaatctaatccaaagtggtcataatcttatgcaaaaatcatcaatatgtcaatggacaaaaaaaaaatagcagtaagatatacatattgtttggaagatataatataataaatattagtattaaaattaaattaattattttcaggactgttcaacaagaagaattgagatttatcgttaagtctttgattattggtcatctatacaagaaaattggaagcatgaactaatttttttcataacaactgagatactaacaaataatatattactgctaaagatacatgattatcttaacagacattgaatatctagtcatgagaagcatcaaaagtaaattttgttggttcaattctcaataatgttattactacaacaatttattagtgatactatattctctaatttatatagtaattaagagatataaacaagtcggaggaggtaaatcttaatgataaataataaaataggaaacaagttattaagaaaagagaaagataaaaattgatagacgcatctgtaagcataatatatagagagaagccgggggggtggagggagaaccttgatggttgtcagcaaaatctatgggaagtctagtatcatttgttgtcttaagtgattctacactttctttcgagggtggatccattgttcgtttctcatgaagggcataatgtgcctccttaaaatttcttgataataaaacaataaattgttcgtttctgcaatcagatatgggagtgttggctagtgaagaatcattattcccctgcaaaagaatgaaaacatagttatgtaccaccgaaaacatatacgaattgaatactgtagtactcttaatttgtgacctggatcatgccaatagatggttctagagaggatatattataaaattcaagagatatcttgcaatagcttaataaataagatattagtgaaaggatgctaattatatgggagacaaacttttaccatattgaatatcactccaaaaattggatgttggattggagaaattatggaaagggatactgctagctgtagtaacatgagcatagtcagtataaatagaaggctaccattaggaaacaagtaagtagagttccaagacattaccgaacaaaacattttagccacttcgtaaaaatcagcctttaaagtatgtaattttgtgccaataaatcttccttgaatctcaggcacagagactagcattctcttaggaataggatctctagctgttataagaatgcaatgcctttctccatcatagtattcttgtgttgtcattttattagacggccttggaaacaactggtttggtcatgattcacgtaacacatttttattttctcattttatggtaaaattgcttgcaaatcccatatgtaatatagttaaattaataatggaataaaaagtaaaagaagtatgtgttaacatatataccgttagagccgatgcaaggccttctaccatggtatgttgatttaaactatcccctttaaaaactaaacatgataggataaataaaaaataatccacatctcttgtccaatggatatattggacattcgaccctgcataaggaacaaaaagaaacaaacttatgatttctactttaaaatataaattttattgaggactaggcatttcctatatgaagaaaagaaataatcctatatagaatgtgtgtgattactagacgaatggatcaaataattaacagtgtcataaaattaaaaggtaaaaataattacaaattaagctgatatatattgaattcaataaaaaaaaaaaggaatgtcttttaccgaaaatgtgcaaaagataactgaaatacctaggtcggagttgtcattatacataaccagacccacctcacactgtggatgattagctccctgtaaacaaatgatgcatggtaaggcaagacatctctcgtgaatttaaaactatactatatttgcatatcttcacatgaaagctcattattgtaggactaatatatgattgcgaatcttttatttttccagtaaagtattgattagctgattgatatggggtatgccaagaaaccttaagttagttataaaaacatgcagtcaatatgggtaactcatgcaaggttacaatagaaaaaattgtcacatcgtcaaatgtctcaagctttctgctactaaaagaatttgcttccttactacatttcttttccattagccttagctttttgatgcaaaagcaaagaggaatagagctaaagggactccctaccttgaccccttatgttgttgactccctaccttgatactaaaattataaaactgaccagaaagcaaggtagttgtcactattccaactaaaccactttttatagaaatctagacttttccatcatatacataagaaaatccaaattatcttccaagcaaaggtatgccatgtagcccaagtttataaactagttgaactgcactatgtcgtcacccagttctgctagttgttgagtcatacttccttttctcccttaggaataatatatatggttgggaactttttctttttagtgaagattttattgattgatatggtgtgtaggataaattaaacaagaaaccttaagttttagttttgaaaacaataagtttatgtaacttgtgcatgtttacaaaagagatcaaagcataaaaaattcaaatgcagaaaaattataaattacctcttctcttgagttgtcaatgaaggtcctgcataatcaattggaaaagaaatcattaatacacattatgagagaaaattcagttcactaattagagcttgtaaatttaaattttagtttaagttattaaacccattcatggcttcattcataaaacaagtttaactaatggggtatgagataaaataaaatatagaacaatactcaacaagaaatgacacacgagtcaaatcttttatataacaataaagaaaaaaaatatttcatttttttatcatccaaaagaggcactttaaacatttttcagctattctttttcatttatttaatgaattgtattaattagtatgacannnnnnnnnnnnnnnnnnnnnnnnnnnnnnnnnnnnnnnnnnnnnnnnnnnnnnnnnnnnnnnnnnnnnnnnnnnnnnnnnnnnnnnnnnnnnnnnnnnnnnnnnnnnnnnnnnnnnnnnnnnnnnnnnnnnnnnnnnnnnnnnnnnnnnnnnnnnnnnnnnnnnnnnnnnnnnnnnngaagaaggacagtgggtttttatagtatttggatttgtgcattaaattgttggttattatttattctttttattatattttttattagaaaaaaatatcacatgtaaaaacagaataacaaaactaaaagtattaatatataattattatttcattcatcaagtgcaattattcgtnnnnnnnnnnnnnnnnnnnnnnnnnnnnnnnnnnnnnnnnnnnnnnnnnnnnnnnnnnnnnnnnnnnnnnnnnnnnnnnnnnnnnnnnnnnnnnnnnnnnnnnnnnnnnnnnnnnnnnnnnnnnnnnnnnnnnnnnnnnnnnnnnnnnnnnnnnnnnnnnnnnnnnnnnnnnnnnnnnnnnnnnnnnnnnnnnnnnnnnnnnnnnnnnnnnnnnnnnnnnnnnnnnnnnnnnnnnnnnnnnnnnnnnnnnnnnnnnnnnnnnnnnnnnnnnnnnnnnnnnnnnnnnnnnnnnnnnnnnnnnnnnnnnnnnnnnnnnnnnnnnnnnnnnnnnnnnnnnnnnnnnnnnnnnnnnnnnnnnnnnnnnnnnnnnnnnnnnnnnnnnnnnnnnnnnnnnnnnnnnnnnnnnnnnnnnnnnnnnttataaaaataaaaaaaaataactaattttcattgtggtatttacatccaaaaataataaatggtatatatgaaatagttttgtgaaacacaaaaaataatttgtttatctcttaaaacgcttcaaacattttttaatatacccctcctctggtacaaaaaaaaaaaaattcagaacactatttatgaaaatttataatgatgactaagattgaatggtggctaagattgaagatatgatgaaaatacaaacctaacaatcttttcgagatattctgaaacaatttttggccaataaggacccaaggtcgagttgccatctactattatcattaaccacttcttagtcgtcatcgatnaagatatgatgaaaatacaaacctaacaatcttttcgagatattccgaaacaatttttggccaataaggacccaaggtcgagttgccatctactattatcattaaccacttcttagtcgtcatcgatatctctagaactgaaagctacaaaaaaacatgacaaacttgagaaacaactgaagtataaaaaatggcaaaggaggtatcaaacgagggtgagaatgcaagtgatggagcactgcttggatatttatataactttaatcttcatcacaaatattaatgacagtggtcagttgtggatacgtaccccatttaaattgaattgacttttgttattttcattaatggatgaaagatactaacaagcaaacattaattatcattcaaattgaattgactttagttcctttcattcatggatgagagataccataacaaatatttatcatcattcaaattgaaatgacttttattaatttcatttatggatgacaaatactaaaaatatttatcacatcgtgccattatgacctccaacgatgaagtaattggcagcacacaactgcacattgggcaccttaacacaaagactacatttgattaaccacgttaatatataattaacatatatgttaggggattaattatgtaattaatgacaaggggtcataagaacaaatgtgttactaattacttcttttcaacaaaaataaattatttattgtgttataatattgcaaacacaagtggttcttagttagtgaaatttaaaacaagaacatcaaatgtgaaatcaacatagaacttaatgatgtaaaattattttaataataaaaacttcaacctagaaaaaaaatacctcaaaagtagagattggaatgaattttttttagattgtgtttgttttagggaacggaagacaaataccatagaaataaatgttagttttatgtgcaacctatatcgtttacattatactttaattcaaatacttttcttttattttcattctctaaaccaaaacacaacattaaattaaatgatatttttaaacaagtttgaattgaaagtggtagtaattaaaaagaaatgctcccgctatcccaaaataagtgtcacatttgagagaaaaaaagtcctaaaataagtattgtattttattttttaatgtaacatnnnnnnnnnnnnnnnnnnnnnnnnnnnnnnnnnnnnnnnnnnnnnnnnnnnnnnnnnnnnnnnnnnnnnnnnnnnnnnnnnnnnnnnnnnnnnnnnnnnnnnnnnnnnnnnnnnnnnnnnnnnnnnnnnnnnnnnnnnnnnnnnnnnnnnnnnnnnnnnnnnnnnnnnnnnnnnnnnnnnnnnnnnnnnnnnnnnnnnnnnnnnnnnnnnnnnnnnnnnnnnnnnnnnnnnnnnnnnnnnnnnnnnnnnnnnnnnnnnnnnnnnnnnnnnnnnnnnnnnnnnnnnnnnnnnnnnnnnnnnnnnnnnnnnnnnnnnnnnnnnnnnnnnnnnnnnnnnnnnnnnnnnnnnnnnnnnnnnnnnnnnnnnnnnnnnnnnnnnnnnnnnnnnnnnnnnnnnnnnnnnnnnnnnnnnnnnnnnnnnnnnnnnnnnnnnnnnnnnnnnnnnnnnnnnnnnnnnnnnnnnnnnnnnnnnnnnnnnnnnnnnnnnnnnnnnnnnnnnnnnnnnnnnnnnnnnnnnnnnnnnnnnnnnnnnnnnnnnnnnnnnnnnnnnnnnnnnnnnnnnnnnnnnnnnnnnnnnnnnnnnnnnnnnnnnnnnnnnnnnnnnnnnnnnnnnnnnnnnnnnnnnnnnnnnnnnnnnnnnnnnnnngttgctgggatggttacttgattgttcattaaatacataagtagttaacaagattctcacataatagtaatgagaaaaaataatgatttaatttcaactgttgagggacaaaaatcaaagaatttgttttacaaagaccaaaataaaaacccatttatgttataagcattcaaaaatatttaaatcttaatcttttttattagtgtctctattttttaaagaataaataatgttcattactttgaggaatgaaatatttttattttaacaatattatataaatgttataacattaagttatatttttaagaataaatgtgttgcaggttaaaaatttaagataaacccattattaaattattatttttaaaaatataggttacagtatattgaatcttattaatatctccatttttgaaagaaatactaatattcatattacacactgtaagaaaattttattcaagaatctaatcataaattgttatataagataannnnnnnnnncagtatattgaatcttattaatatctccatttttgaaagaaatactaatattcatattacactgtgtaagaaaattttattcaagaatctaatcataaattgttatataagataagtttatatcattaacttaaaagtcataatgataataatgtaaaaaaaaaattgactatgcatttctatcaatctcttttttgaaatatttattattattattattattattattattattagagtttaatttatatacactctcaacttatttattggttttacttcttagttaacaagtttcacttataactaatcactactacaaaagtaggcttttatgacctaccttctaagacagttccaaaacaaccgtcttaaaatgttaggtggtaacaattttgtaaataatacgatatatatgacgacggttttataatatccgtcttagaagtgcagtgtttaaagatggttattataaaattgtcttaaaaattaactatacaaaaacgattttaaaataccgtctttaaaaactacctttcaaatacgatttttgtaaaaccgtctttaaatttgtgcttttctctctcatctttcaaattttgaatcacaaaatccgaagaacggccatttcgcttcctagcttttctctctcaccatttcgcttgctttctctttctctctcaccttagttagagccatgtctcatctccagagtcttagggttgcagagccatatctcactccgacacccagaagaagaagccccagtgcagcgacggaaaatgtgaaggaggaagagaagaagaaaagataccctcgacccctccgcatctcctccgcatcaaaaaaatcgggcactctggtaccgtcgaccccaaggtcaccggcaacctcatcatctaccccatctagttgtgttacttgcaaaaccaagttttagttgtataactgacaaaaggaaagtgttgctgaccacaaatatggtgattttggagttcacacagtacattgttgagtccagatggagacaaactgtgataaacagaaagcatcgatcatacagaaaaaggcaatgaaataggagacctcaacatatgtgccacgaatttttaaataattttcctaaatgacacgcgcacagtacatattattagagtgccacgtttcctaattcgctatccaaggcagcgaaataggggagctgatgtggcggaaatctggtggccatgtatttcactacaggcaccagcaaatacgtggtaaaaaacggacagtccacgtggcgtgccacatatttcgcttggcccccaacgaaatacgtgcaatgttcaccaaaaaaaggggtcgttatggacacgtgtcagacatggacgtaatttgctacccagcccaacgaattacgtctacgtggcccagaatttaaacccctcccccctccttcatccatcactctttcactccttcactctcattataaaattctctgaaagtgacatttctctctcattgagtctcctctctcattgtgcattgtaacaggtaagtattgtttttttgaatatattatatttataattttagttgttaaataatttatatattttagatttgaaacattaggttagaggaaatgtagtttaaaattatgattgttaatttatagggtagatgattaatttagtttatgattgtttggttcttagaagtgatagacatattttagtattatatacatttaagaaattgtacataaaaatatatgtataggaagttgtaggaaaaaatatacgtgttttatatttaattaatttgataaaaatattttatttaataaatataatatatagatataatatttaaattaatgatatattaatgttaatacatataacttgaaagaaataaatttatttaaatatttttgaaagnnnnnnnnnnnnnnnnnnnnnnnnnnnnnnnnnnnnnnnnnnnnnnnnnnnnnnnnnnnnnnnnnnnnnnnnnnnnnnnnnnnnnnnnnnnnnnnnnnnnnnnnnnnnnnnnnnnnnnnnnnnnnnnnnnnnnnnnnnnnnnnnnnnnnnnnnnnnnnnnnnnnnnnnnnnnnnnnnnnnnnnnnnnnnnnnnnnnnnnnnnnnnnnnnnnnnnnnnnnnnnnnnnnnnnnnnnnnnnnnnnnnnnnnnnnnnnnnnnnnnnnnnnnnnnnnnnnnnnnnnnnnnnnnnnnnnnnnnnnnnnnnnnnnnnnnnnnnnnnnnnnnnnnnnnnnnnnnnnnnnnnnnnnnnnnnnnnnnnnnnnnnnnnnnnnnnnnnnnnnnnnnnnnnnnnnnnnnnnnnnnnnnnnnnnnnnnnnnnnnnnnnnnnnnnnnnnnnnnnnnnnnnnnnnnnnnnnnnnnnnnnnnnnnnnnnnnnnnnnnnnnnnnnnnnnnnnnnnnnnnnnnnnnnnnnnnnnnnnnnnnnnnnnnnnnnnnnnnnnnnnnnnnnnnnnnnnnnnnnnnnnnnnttttaacttgattaattgaaatatataatacaaattatgatatatatacgcatataataattaaatatatttatttaagtaaattaattaattaaacatatttaatttaaaaattaaattaaacataaagtattattacaatttattattttctatcacgtgacttttatctaattttgaatatttattagcatattatttttttatttatatactatttaatattgatttaatgtttgaaattgtcatgaaaatattaacatatacttatataataattaaacatatttatttaagtaaattaattaattaaacatatttaatttaaaaattaaataatcataaagtattattacaatttattattttctatcacgtatcttttatctaatttttgaatatttattagcatattatttgtttatttatatactatttaatattgatttaatgtttgaaattgacatgaaaatattaacatatacgtatataataattaaacatatttatttaaagaaattagttattttacaaattatttgacaatatagtaatagacatagtaatacatatttttaatgaagatagggtagtcatagtgaaataatttattaaaaatagtggatgattttcgtaggaaaaatcttccatataaaataatggatcacgatcaagatatcctagcaccgctaacgactgagtctccgttgagcttcattgaccctggtccatctgtacggactttgttgacgttacagaatagacatatatcgacgaatgtgtggaattcgcagggtgatccaaccgcgcgggatcgtgtaattaatgttaggcatgccacgacacacgatcatcaaactatacctgaggagatccatttgtggcttatacaggcagatttttaccacgttgcgcatctgcgcaatcacgaggtaaacatattctatatctaatgttgcgtgtatgatggtgttatggttgtattgtaatgtgtatgtaattgtggtttaatgtattatttcaaattgaccatcaccttgtttcagcgcttgttgagcgatgacgccctgagacacgtacattccatatgagcatgggtgaggtcaccatcacccttaaggatgtacatcatctgttggggctgccgacagatggtgaggttgtttcaggccgccatggatgacataacttccgcgaaatagttggtgaccttttaggggttgagcttgctgcgggtcgggatttacatggaggttcgttgggactccactatttacaggagcagttcgatgtatatgccgtccatgctgacacagaagctggacggatgagatacacccacgcattgatattgcgtattttaggcgggatgttgtttgtggacaccgcatccagctttgtgccagcccgatatctgctatacttggatgatttcgagcgcactagttcgtttagctggggatctactgtgcttgcatcgctgtatagggagttgtgcaaagccacacatgcatcacgtcgcgagatgggtggatgtgcactattgttgcaattgtgggcttggacgcgattcctgagtatctctctagaccttccacgggtggacgatcaggatgtgcttgagcgcaagatttatggaaataggtattgtaattgtgggtttgccattattgggagtaaatgttgttgtttctaatattttgttgttgcaggttttatgtttatcagatgcgccaaaccagatttacccatattcgcagatatcgtcattatatggatgtcatgcgtaggagagatattcgttggaggccatacgatcttgttgatctagttcatccaccagatgttaacatggctagacgatggttgactgtctgtccgctgatttgttacgagattgtcatgtaccagcagtcggatcgagttttgcggcagtttgggtttgaccagctatacccaaggatccgattaattataatgagttgctgaccattagtattacctgcaagacaaacgtggattggcggaagcaacatggtttctacattgcccaataggcagccagagatgcccttgtcttgcaggatcttactcctatgaggagagatgagtatttgtctgtcaacagtgagtacatgcagtggtactacattgtcacacgccactggatgactcgaagagcagcgtttaatgcacatatggtgcgtaaattatttatatttgtgagttttttagttaacttaatgttggtgttgacttaatttttttcatgcacagactgatcgctatgaaactattgtccacatgacggcaccagagtcacagggggcatttgacatgagtcaggtgtatggtgaggcggttcgccttttggccgcatgtgacgatttggatagggtcacagattctggagatgttgcgcccccacctgttcgacgccagaccgagacccctcctccagtggttcgtactaaccggcgtgcacgtcatgggggttaccccttcaccactcaaccccgccagtagttgatacacctgtcattgtggcatctattcctccctgtcctcctggcatcttctacacacccagctacccttcggggccatcccaacagtacttttggccgtcgcagtttcaagccagttcatctagcggtggacaggaatcattcccaccgtcacagtaccccccatggtatactgcaccgccgatgccatagcctgggttttcatttccaccgtatttgatgtatgcatatgcatctagtgttcaggcgacagttgggcctagttcgcaggcgacatcgggctttgcagagttttataggcctgcccaggcgacaccagagccagatacggtaattatgactccgattgcatattccacacatcttgtggcatcttcggcctctggcaggcatgatagtcctattacggacttcttagcgacgacaatgcaggacggaggtatggtggtgatgatcatcgtgatgaggaccctgaccgactgattagtagaaatccagtaaggggagcacgatatcgatgtaatctgtcaccgtatgagcataacataagccgatgtgggggatatcatggagaccacgacgacgattagtgactatcaattattttatgtttcgttaatggtttcttaattttattggattacttatttgtcagtggactatggttggatgtttattttggacatttgttgtttattacttaatgattgcgtacatcctttaaatatcagcagttgttgtaatgacgaattaatctagaaatttttaaatattacattatcatttgacatacaatttagaactatacatcattgatgatgcaatcgtgaaggacagttccgtctgttgtgaccaaccaccttacaataaccacatcttgtatgagtcgtggatccttcccgcgaatccatttcgtttcgtatgcgtgtagtgttaggccttcctcttacgtctcagcgacacatctggcaagacggtgggttgtcgagttggtggtatgaagtccccgttgccaattggaaaccactgttatgaatacaattgacattgataagcgacactatacacagggtctatatattgagtgggatcgacgtgtatggatcggcaagctgcaacaacatgactacaagggaacctggatgcagtgaactcaccacactgacaatttcttttcgataacaacattgaccatttcttttcgtcccgatgagtacgtatgttgtatgactcttggacctcaaatcctgtgttcagcgtgtcgtaagcagtaacacaatgtgtcgaggagttatgaacggtcttcaaatatttttgccacgctaatttggcaaaatgattacctctcgccatctcttcacaagcctcaccaccatgttgcaaaaagtatgtcacaagtcgagcgcatgtgaatcgcacaagtgaagtaatagaaaggtttcttatgcctttaagtacattgttagaaacctcagagagattggttgtcatgtgaccaaaccttcgtccctcttcatcataagctacactccacttctcctttgggattcgatcaatccatgcggctatctgagggcttgcttctctaaatttttctaatctggcaccaaaatctaaacacaaggttgtataacctgcatatacaaacaagacgtaaatataaggacaaatcaatattgtggatcagctgcatgtaatcacaatgttgtctagtattgcttacataacattttcaattttttcttcaacatcacattattgaacttgtgattaaaattgctcgctaaatgccgaatgcaaaaaatatggtatgccctgggtggatgccatcccagttccacattgttgaccgccgccattatgcctgcatgccaatctgaaataagacatattcgatctttttgcgtaaccatgtaatccaaccaccttggcaggaatgcatacgactcatcccaatacccgaacaccttcacaatagccttttgctttgccttccatgccttcctgtatgatatatgataaccgagcgttgttgaaatcctttcctgaattaacccaattttaacactggggtcctccctaatcatttctacagatcattagacaataacatgttaataaacattgcaaaaaaataaaaaagtccaatataacgtattttaattacctacgatcaacgaacatatgaaatttaagtcaagttgcttgtgatcttgagagagattatgagtaacgcacgtgtgttggttgttccatatgcctacaacccattcagtggcagccttctttcggtatgccctcatcctccatggacaaccgtcattatgattttcacaaaccattataattcttttcgtatcactttttgcaactacggttgtgcgatgctcagccatatagtattgctttattgccatttgcacatcggacttgctcccaaacacctgccccttatatagctcttgatccatctcccagttaggtatttgcacttcttgcatgtcatctacctcctcatatggctgtgcccaattaatatacgtgtaatgacttatgttagaccaaaatagtacattgccctctcctgtataatgacacattgaacacattgtcatgttaaacccccaatcattttaacactcctgactaacacacagttatgtgtccatacctagtaccgaaggtggattttggattccgacaatcctcggagaagggattgcaaaagcatgatcgaaatcaccgtctacgtccgtatccgatgagtcactatctggaacaacaccttcatcaacctcttcctcagaactgtccatgagccaagctgagttgtgggccgacgccatttctgtatctttagaatcaaattgctgggttggttgggttggtggtggtggttgtggtgatggggatacatctctatcttctgaattcaccaccggctctatgttaaggtcaatagagccaatgtttgcaacaaattgttgactgcttgactgcccaccacagtatacttccgcatacaattctataaatctggggtttcctccatcggatgtgcatgcgtctgtaactaaggctacatcgtcatcatctacaatatccacaccaacccactacaccaggttgccggatgcacatctagcgctcaatcaagatacagattgaccccgttgtaatcgcaacgtcttgtatatcattttcatcaaatcatgacaactgcatcctagaagcatacgaaacattttcctttctccttcaaacagttgaccattcggtccaacatatctcctcccattataatatacaatggtgattaaaccatttccactaccactcattttgcagagattcacaaaaaatttagagagtattcgaataaacacaaagtgtcagatgagatacaaatggaagggggtgcgcttatatagctgggggtgtggttgtaattcactgggctgggtagcaaaataggacacctatttcgctggccctggtagcgaattactggggtccagccactgtcactcatccacctattttgctacagcacctagcgaaatagtacacgtatttcactgactgtcatagcgaaatcccttccagctgccacgtgtcctacccgtttctgactggtcattgactcattgaccaatcttacgccacatcaactcacctattttgctgtcctgggtagcgaattacgcaacgtggcactctggtaatatgtactgtacacgttgcatttagggaaattgtttaaaaaatagtgtcatataggtcaaggtctcatgaaatagatggtttttatggaggaatcaggaagttgcataggaaggaagaaattgcaaggtggaagaacctctgacttctataaaattgtgatacatgattgatttgatagcttagaatttttgtaagttaacagtcacccttcctaaaatgtgaaggattacttggtcacagaactatgtcattcctaacaataggtataaacttggaaatagtttatggaagaattttcagaggttgtaacatgtgtagcacaacataacaaaaagtggatatgttgcagctttcttatacgtgtctatgtataattttatagaagaacattggtgcatagtgcatactcctgtttagctaaagtagagagaaggttcattagctccttgattgtgattagttttcaagctggcaaaattgcgtagcggttcggctcttactcgaagaacaaaattaattaaccgagataattagagacggcaaaaatatccatatttgtggaatgtggataattgtgatttttttggctaattagcttaaatgtttctgaaattttgtgccattactacaaaaaagcactttttatgtctttatttggaatgagagctcttctgtgttttgttttgtttgctggtttgagtttaggttggcaagggcttgagaatgacagttgtcatggactggtagaggtaatgttgatcaacaaagaaaaagaaatttgatgctgaagcagctcctaagtgaactattgttaaaggatggatgcatatatcttctacttggtgcaagaggtgtgggagaagaaggtgaattgggacattttgtgactgatctgaaagcaaggcaacaattttttattgaagttgaatgccagtgtcaggaggatgggatgtatgacaaggtaattttttgttgaggggtattggtagatcattcttagcaacaatgagaagacgtgagtggtcaggctttatttagagatctgattaatagttacaagtaaaacttaagttcccaataatagaaagctgtcaagctaaggtcaatcaatgacgacaatgaattttgtaaattcccaccaaagacataaaaatgaaaacaatttttggaatggaatatattgtgacttataatttgttcctctcttcttgggggctaattcctctatatataatgaagaacatatcatcatcatatagcattatttttataactcatttctctctctctctctctctctctgatattacatatctttttttatatttttctttcatagtattatttctattaattataagataaaagttagacatataatatgtgagctacatcttatatatgtcatacttgaactcttttcttcttagctcttttctctgaaaaaaagttatattacaaataatatgtcagtctatgttaatttaattaattaattttctctttgctgtctttggttgaacatgtaccctctttcttaatatcttatttactgtcatcctcaaagtgacagtcaatcataaattttaatgggccaccacacacacgcacacacacactctttctctttcagtctcaacacgtacacaaagtagacctgaactttctcaaaacagatacaacccacatgcacacatagatagaagaatgtgtgtgtgtgtgtgtgtgttcgagacagtgagtcgcattctgtggtctcatccattctggcaatacttggcgagaaccggactcttagcctcatccattctggcaatgagattttatcatggagtgatctagcagttcagaatttatgtgctaaattctggttacttatcttcatacctcttggcctggcatagttattttccttccataaacttgctatgcaagtgaggacatatggagatatgttgggaagctaacaatattggttcaaaagagcatgttagatgatagattcaagtggaaggttagtacatacttaacttgttgaaaatatttttttttgattacttatttttaatagaatatcctcttgtaaataattttttttatttacaagatttgaattaaaaagtttgctcaaactgtgtgtggatttcttagtttataactaacagacaacaaggctatgtaaatttatatgtctctaactgtaatttcttggtttataactgtgtctgaattttttcatgatgtagccaaataagttccaaggagaatgaaaactatctaatttgatttttctgcataaaatgttcactcatcaccacctatttctatcatttttttttaatcttaagcttggcctgtagcagttgcattaaatttgtattttttttatatcttagttgaatttgggtcctttaattcatcatataaggcatcttattagtcttgtaagtttacccttgcagttgtgatatgtctgtgtgcactacaacatcatattagtcttgatgagaatactgttattttaattataacctgtcatgcaagtgctagctttcatacatatatactttttatttaaaaccaggaaagtggtgggcacctaggcagaagaaaccaaacatttgttcatggtgttattatcatgccctgaatttgattttgttgttatgtttgttccttaaggccatgtttcttgtctaatgactattactttattccttatttaaggcttgttcaataatgactcattggcttgtataattgtgagttttatttccatattggaacttggaaattcaagtgaatagagaaatcagagattggtaatgaatggactacggtaggaccatttaaatgagaaaatgcgacgactgtggttagtagtcccttaatatttccaacttttgtctttcttaattaccttcaaaaaccacaagatgccaaagtggtacacaatttattattgtatactatacttggggcattttgtccccatccctaataacctgtccccttttcacaactttatgtaatcactagaagctaaaaagataatatatatatatatatataattgttctattccatcttctatatagttttttggtcacatgcattgaaagataataagatagtataaactttttgttttggtgatactgatatgcacagactatattgtttataagatatacaatatttttctaagatgtctctttcttgattataggatatattcccatcatttttgtaaaaaaaataaaaaaattaaactaagacggttatttagaaaaaccgtcttagcttaaatttatttttaaaaaaaaaaacttatttctaaaacggttcttatgaaaaccatcttagaatggtgtcattctaagacggttttagcctaaaaccgtcttagaatgatgacattctaagacgattctgaaccaattgtcttagaatcctttgatacaaagacggttattgaaccgtcttcgtatgtcttacctttcaacgacactctatacaaattggagaactgtctttgtatgggtaaaataaccgtcttaaaaaacacttttgtagtagtggatactagtaaataatgtattagaaggagtgttgttagtcctcctcaattataagtcatccttatgatgacttgatttaaatatgtatatggatgaaacaaactggatatgatgatgtcattgacaatttttgtgtgcttaaccattagaagactaataatatagcactcacattatcggggtatcaatatataagttctagtggtaataatttgtattacaattatttataatgattatcttaatttatagtatgattttgcttctctttgaaacgaatttctatcaagtggttgaattttttgttaatttttacaatttaattgtttatcaatataataaaagttagttaggtagtccataaagaaggctatatccagcgtatataataggttgatatgccttatcaatcaaattgcttaattaaactagtaagtcaaacttttaaaatttaaggcccattggttggtgcaccttttctcgtattcacattgaagtggatcagaaaatcactagaaagagattgaatagtgtaatgcctgatattttaagcatgtgattaaggccatgattaagggtaatgaacatgcttgagggtattcagaggaaaaggcttgaaaagagatgaaataggcagtttctgccttgtggcgcgaccagcgcggagtatggcgcgaggcgcgccatatgcacaagataggcagattggttctgccatgccacgcgacacgcatggtagctggcgcgcatcgcgtgagaagtgccccagaaacccatgttttctctggagctccacgcgagtcacgtgaaggttcacgcgcatcgcgtgggaggcccgaacaggtggcgcgagtagcgcgggttatggcgcgagccgcgcgagatcgacagatttgttttataaaaggccatttctggctgaatgagagagagagaaaagagggaagagagagagggaagccattgttgattccttgagcttcgtatcttctccatagctcatctaaacacctccgacccaactgagaaaatgatcagcacctcgagataagtcagttaacccgattgattttcgagaaaagctgagaaatagtgagattagatttctcagagagaacccctgagagcttgagacccagaggcgaaagaggcctagatcgagcgagtagtccgagggaaagtgattccctggtgcttctgagcatcacagaggtaagaaactcaagctctaaccgttgattctatgttttggatttcggggttttggggttatcttgaggggtgtttttggaggtgttagaaccgttattaggctcggactctgtggagtcttatgctcagaaaggtattctgaggaagttagagccttgaatcatcgttactgatgaagtttggtttggctctgagtctgcatgagcagagataaaagggtcgactatttgactagtctggaccttagagcagttgataaagttgctcatgagattatatagatgagtttgatcggtttagatttatgattatgagaagttggattcaggccattgtaagcagagatatgcttggccatagttgatcagagcttttgtggaggctctgtagccgtgtttaggctgagaggaatcctgttgaggatcagatggtcacttgtgaagtgatttgttatgtggtttagaaaggataagagttcctttcgcttgaacggtctagaaccgtatttgatatgtttatatgcttgtctgatgtaggacctgagcgtgagagctctggtggtgctgaccacgaggccggacgagctggtgagcagtctagaacaggtaagctcttggtccttggttgtgtatcctctgctgtgttccaccatatacccagtggggttatggttctgatgtgtgtgtatgttagcagaggaataatgtattatgctatgattgaatgatgtatgtaatgtgaaccctatgaaagggtatctgatgtttgaaccctatgaaagggtagctgatgcttgatgcttgatttgagcccagaaatgggtaattattgttatgaccatgagttgttgattgacgacgtgatccctgagaaagggaagtcgttatgttgattggtagcatgcttgattaagtatgatatttgagtatgcatgctgagattgattgatatcctattgtagtaggataaatggctgtgcttgatagatatcctattgtagtaggatagatgatctgagattgagaaagacctggtgacagatgagcctgtgatatggaggtagcctcccatgtggagatgtgcccatatacacagaagaagcctgcccaggcaagtgtatgaggatagaggatgagatggcccgtgatacatagaggagccccttggccagggatgtgcctatgtacacagaggtagcctcaccaaaaagggagatgtacctgatatatagatgaagcctcgtgtgagagatgtgcctatatatatctagaggaagcctccgccagggatacatgcaggagatgtgcctatatacttagatgtagcctcctcatgacagtgattgatgtgatgaatgactatatgccatgaatatgccttggtggctgattggtgtgttaaatggcagtgagccatgtgtataacctgattgtagtcaggtgttgtgcattgatgtgcatgatggatgattgaatgacctgatggtactgttatgttttgatgcatgtatgatgattgttctgttgagaatgtaaattgtaccctatgctaagggattgtgatgcatggatgtataccataggtataccctggtgtggaacaatggaggtgtattgaagtacactgatatgtgatgtttgtatgtgtgtgtatatatatatatatatatagctgatgtttgcctatcttgtgatgatatttatgtgatgtataattgtggtcagtgaaccaggggaaggaaataccttcaagggccctgagtttactgagattttatatctcaccccttgtgtgggctatgtttttacaggtgattcttcaggaggagcagatagatcccgaggcaaggagcctatgcagggatagccgctactacacaccttaggctagttgatatgagcctgtggctctgatatttttgtatgtagcctttggttttgatttttgttgtaccctaaggggatatttgtatagttttgtataaaacagagatgtatgtatattcaccatacgatatgtacagtgtatgtagatgacatttgatgatgtcactcatgtagtatgcttccaaactgcttaaactctgattacaattatgattgtggttgatgtttggtaatgaccctgattagcggattggggcgttacaaatagtgacacttgactaacacataatctctgaagtttctaagatataccaaactttagttttccaaaactttatggggagcaatgcttatcctttgatagtagtactttgtataaaaattcaatttggagagttgtaaccgtatttcaactccacttgttgttaatgaaaagctctataatgttgatggttatgcaaaggaagatgtaactgaaaatagaagtttggtaagaagccttccttatctatttgcaaaggaccatatttaatgttttgtactagcctactttaaaggtttatgcactcaccaagtttgacatactatggtttaggaaaaaaggtgttgagatacttccaaggtactattggttttggcatttggtataccaaaagtgatgaggaagtttgaaggttatgttgatagtgattgggctggttctattgatggttcaaagagcacaactagatttgtcttttcatttggaagtggggtgttttcgtggaactccgaaagggaagatgtagttactcaatctttagctgaagcagagtatattgttgcaacaacttcttcaaatattaagttatttgggctagaaaggtattggattacttgaatcatgtaaagcgaagcctacagagctatggtgtgacgacagttcaaccatttctattgttaaaaatccaatccaatatggaagaaccaaacatatctatgttaaatttcatgctatcactactacaaaaatgattttcaacaacattgaatctaagacaggtctagagatggtttttccaaaatcgtcatcctccaaaatgtgatgtgttgcgtactcggcaagtgcaccgatcgctcatgtaataaagtgataaataaagtatcgttcccacgaggattgttcaaccaattaaactataaatgatatcgataagttggataataaaaagaatgaatatgaattggttattgttgtgtgtatacgaaataaactaaaagctaagcgtaagcatagactaataacaacaagtagatagagtaaaaatgatatgtaaatgtatgtagctagggtaacccacacttaatgctccttccaatgagaatgtattgtttactacactcacttatctaagctattcagctaatgtgtttttagaatttaactaagccttgattcctcatgcacttagttctttaactcaccttccaaccctaattccttagtgattttcagtaagttaagcattaaacaaacacataaatgaaccaagccacaagcacccatccctattcctaggtaatgttagcaagttactacacttagttccaaaccaaagccccaatattcctattgtgaaccctagctctaaatgctcacaaagaatggccaaatctaagaaagagatgaaagaattaaagcaagtgcagtaaaatagcttttgataaatgaataatagcattcaatacatcccaatgaaatttacatcaaatgctttgaccctaactacaataaaagctcagcccaacctcataatgggtggctgatgtacaaaaagatacccagctgaagcaaggaagaagaagatggagaaacaacctccacttggccctcaacttccctaaactctcactaggtgcccaagccctctaaaccctatttttcagtgtttttcgtgctccagaaacgtgcattgaagactgaggtttaaggtatttaaaggagggtaagtgaaaatccaagactgccctttctcagcttcagaattgcacagacagcagcttcccacgcttggggcgtggaatcccacgcctggggcgtggctatccagagaaatcagcatatgggggcaccttcccacgcttggagcgtggggtcccacgcctggggcgtggacttccagaggaacttgcaaacagagccattttctcacgctgggggcgtaggttcccacgcctggggcgtggatgacctgagcttccaaaaatggcttgaattgtgtgctttcttgctataaagatgttcaaattagcaacaaccaataaccgggatgcattcatcaacatttatcataaacttatgtaattctaagctatttgtcaatgacttttttttagcttttagaggcttggaatgaaccatatgctgggcgcatatcatgatgacatttttgtaaataattgaatcctttaaacaacgattttataaaaatcatcatagaaactaagtgttcaacgatggttttttaaaaaccatcatagaaatcaagttctcctcgatgtttttttaaagccgtctttgaaatcaataaaatcaaatgttattattcttgcactttcttagactctcactctcttagtctctctcgcgctcttcttggacctatatctcttgtgccctctctcctttcgccccgccccatcgtcaaatcccttgtctcgtaccattgttgccatcgaagctccctcacttcaatttctctctctcgctctcgattctgtctcgcattgttgtagtgatggattgcacgtcaacgacgttggactcgttaccggtgctcgaactcctcttcaaggagtgcatgtgttggcgcgtggatttcctcaaggtggtgttgtgggcgaaggaggaagagaagcaagtagtgagattaatccttttccttagcaaggaagagtttgaaggaactcgtgattagggtttcaccttttggagaggactcatgtgaagcgaatcaagcgatgctgcaaggattgatttcctcagcgatgaatagttacgacaacaaggcgttcatgaaggcttttgtagggaagattcttcgggatctttcatcgagggagatggcgaagagagtgttggagagggcgttcatgatgagcttaaagataatgaaggagtccttggaggattattcaagtacaatgttcaaagggggtcattataagacggaggctattcagagcttgaatctatataaggcttccaccaatgggaatggagcgatgattgagcttagggttgccgacgttgtcgttaaggaatggagtgagcaagccagcttcactgttgatttgcagagggcgttttgtgatgatgtgtggaggaatattatgattggctttcctgctgttattctcaggtgtatgtgtaagctcgccaatgttgtctctattggcaccattctcgcttctagataggtaatatttcatgttcaattttggttttgtggtgatattttccaaaatgaagtttattattaaaccatctagaactctttagctgatcgaaatttagtctcattcattattattgaaccctctagaactctacaacctttttccattattatatatgcaagtaaacgattaaagctattagtttttctcagaatttttggtaaaaaaaatgaacaagatactacttgtaatttcacttgcctattttaactcaggattactaaaaattctaaaaatgaaaactggttagatatgtgcgtacgtgaaaatgttgctagaattgtcttatgagtgataatctattgtaaaatagggcttataatgatgctgaaagtgaaaggcatgaaggagtggagaacttctacagaaaaaatcacacttacaaattagttgatttcgtaagcatctaccacaagcatttaccaatttgcttcaatgcagatcttggcaaggtgttgaattgcatagttttggaggacttcctcaatgggcagtagtaggtacgtgtgagatttatataggattgacacctatggttaaaaggtcatatcttacatgccttctttgcaaatttctagttaaatcataaactaatctttaatatttactatgctcatacaaggacacacactactacaaaaaacacattttacatcagttctataccctttataatgacgattctacgaccgtctttgtagcgaagtcatcgaaagtcataactttcgatgacgattctaaaatcgtctttgtagattaaaatttctaaaatggttcctcaggagaaccatcttagaagattattttttttcaaaaataataatttaaataggtgtttctaagagggttttgtgaaaaaaccatcttagaatattgacatactaagatggtttttcaaataaccatcttagaaagatatttttaaaaataaaaaaaattacagtgtttctaagacaattttccttagaaccgtcttagaatatggtttctttttttaaaaaataaaattatacgtgtttctaagacagtttattggcaatggtgaaggtttgagtattaatggtgttggttcctcttgctttatgtctcctaataataataatcatttcacctttaaactacaaaaattgttgcatgttccctccatttcaaaaattttgttaagtgtcagccagtttgcaaaagataattctgttttctttgagtttcattctaagttctgtcttgtgaaatcccaggagacaaataaagtcctacttcaaggatctgttgaagctgatggattgtactattttcaaaatatccagctccagcacacctctcctcaattgctgtccacttcaacttcttcctcagcaaacaacttgtctaaaaattttgctatgttcaataatagctctactgtttgttctaattctgttacttcttttcctagtacttcccatgtttggcatgctagattagaacatccaaataaccatgtattgagacttgtcctaaaaagttgtaatgtttctcaattaaataaaactgttccagatttttgttcatctctttgtatgggaaagtcacataggttgccatcatccaattctaccactgtttattctcctttagaactgatttttatagatttatggggtccctctcacataacatcatatgctggttttaaatattatgtgtctttcattgatgctttctctaggtatacttggatttttcctattaagtccaaagctgaaacagtgttttccagcactttaaatctcttgttgaattacagcttaacactaaaataaggagtgttcagtctgattggggaggagagtatagacctttttccactcttttaacctcttttggtatctctcatagacttatttgtcctcacacccatcatcaaaatggtgtggttgagagaaaacataggcatatagtggacttaggattaactttgttgcatcatgcttctttaacactgaatttctgggattatgcttttaccactcttaattttgccattcccctcaccactctttttcataaagacctgattttaagtttatgaaaacctttggttgtgcatgttttcctctcttaaaaccttaccacactcacaagcttaatttcaggtctcaagaatgtttatttttaggatattctaattctcacaagaactacaaatgtctgtcgccttctggaataatttatatctctaaagatgtcttgttcaatgagcaaagatttcctttttctgacctgttcccttcatgcacaagtcctgttagtgatctaaatacatattttagtcttaatcccaatttgtctcctcctcctgtgctgtcagaaccttcccatacatagtctgtacctactgaaccacctggtttctctcctataaccagttagcatactgttgttccttctcctgtgtcacagccagctactgtttcaacttctgaccctatttcacatgtctcttcagagactgctactgtctctacaccctcctttgcacctactaatgtttctacccctcactccatttccaataacattcacccaatgcaaactacgtctaaatctggtattcataatcctagattacatccctccttgtttcttgttcattttgagcctaaaattgtcaaacaggcccttgctaactcatattggcatgctgccatgcaacttgagtatgatgccttaatgagaaataaaacttgggatttggtttctttaccttctaacagacaagctattggttgcaaatgggtgtttagggtgaaggaaaatattgatggcacaataaacaaatacaaagctaggttagtagcaaaggggttcaaggttttgactttcatgatactttttctcctgttattaagcctgtcacgattagaattatcctcacacttgctatctcacatggttggaagttatctcagcttgatgtgaataatgcatttcttaatggactcctagaagaatctgtttatatggtccaacctcctagttttgaagttgctgaaaaacatttagtttgcagacttcacaaggcattatatggtttaaagcaagctccaagacagtggtttgatagactgagatctactttacttcagtttggctttgaagtaagtaagcaaatttgatgggctacaaagtcatatttgaagacaatggatgcttgatcaaagacacaaaaggcaaagacgtattcaaggtgaaaatgagaaatagtacccttaaggtacccttatttgtttggctttaaaccatattcaatttggctttgaagtaagtaaacaaatttgataggctacaaagtcatatttgaagacaatgaatgtttgatcaaagacacaaggcaaagacgtattaaaggtgaaaatgagagctaaaagctatgctctaaatctgatggaggaggagcaaataactttttcaagcacaaccaccaatgttgaacttggcacaaaagactcggatatttgtaccttgttggaattttatacatgcaaaagcatgccttggtgaaaggtgtctcgatgcttgaagacaagttggctgattgtgtggcttgccaatatggaaagctagtcaaaaaaccatttcttcaaatagttgggagagcaactcaaaagttgtagttggtacatacagatgttgggggaccttagagagtataatccttaaaagtgagagaaaaaatagaagcatcatgaagatgacaacatgtatgtgttgcatgaaaaggagttgccaaagaagctttgggcaaaggctacaagcattgcttatttctgctgaataggcttccaaccagttttgaacaaaaaaaacatttgaaggctagtttgggtattaaccagattaacaaaatctaccaatcttttgttgtgtttgtttctcttatgttccacaagttaaaagggacaaacttgataagaaagcagaaccagaagttttcattggatacaatagcacttccaaagcttatcgaattttccaaccactaaatgtaaaaattctttgagtaaagatgtcaaattcatggaagatcagcaatggagttgggaggaaccaataaggaagcaactgtcagaagccccacaattttttgatgataatgtagatgtcattcttgttagaggtacgagatctttatctgagatttatcaaaggagtaatgttgttgtcttagaacctggagaacttgaagaatcggagaatgatgacaagtgaatagatgctatgaaggaagagctaaagatgataaaaaatgacacttgggagctagtgaacaggccctcaacacaaacaacctgtaggagtcaaatttgatttatagaaccaaactcaaattggaaagttctataaataaatacaaaggctaggttggtggtgaaaggatataccatgtgtttggagtggattatatgtgaagttggtttatgcaaatttaatcgttattgttgtctatgttgatgatttgcttgtgacaagaagtgatgagaaactcaaaggagtttaaagctagaatgtgcaaagtgtttgacagaccttggcttgatgagctattatgggaatggaggtgaaacaagatcgtggtggaatcttcattttccaaaataagtatgcaagggaaatactaaaaaagtttcatacggaggactgcaaaagcactacatcttcaatgaaccaaaaggagaagtctagcaaggatgatggagctgataaagtagatgaaaagcattacaaaagcctgaatggttgcttaatgtatcttactgcaaccagaccagacattttgtttacagtaagtatactttaaaggttcatgcattgtgctagtgaattgcatttcaagctgccaaacgagttgttagatatattaaaggcactatagactatggtgtgatgtactcttattctcataattctaagcatcatggatactctgctagtgcttaggcaggttgtgttgatggtatgagaagcacctctagttactattttactgttggttctggagttttttcttggtgttctaaaaaaaaataagttatagctcaatcaaccacagaagtagagtatgtagttgttgttgttgttgttgttgtagtgaatcaagctctttggatcaagaaaatcatgacaaatttgcttatggaacaagaagagaggacacaattgtttatggacaaccaggctgcaatctcaatggccaatgatccggtgtttcatggcaaaacaaaagcatttcaagataatgctttttcttctaagagaggtttaaagggaagaagaagtaaagctattgtaatacaaaacagagaatcaaagtgctgacattctgaccaaggcactttcaaaagcaagatttgaatacttgagacaaaaacttggagtttgtagttccaaagtcaaggaggagtgttgaacaatgtgcctgttggaaccgtttaaaaaatgtagaagattagatttttatgctattttttaggaaaataaaagtcatgtagacgataggatgaatctgttttattcctattttttaggcatgatctgttagtggttttatctatctattaacaattcgttttttgatatgttttataaatacgttgctttatatctgaataatataacccttctgcaacaacatatcatgtttcttttatcgttacatttaatacctgctctcataaaccaaaaacaagagctacctaaacaagttccacatgccacaacgattgatctctaagcaggcaaaaatgctgatcatggcttgtttatggaagaaggagaaatagaaattcaatattgtctataaccatgcaaaacttaacaacacattcagcacctgtgtatggtttgaataaatcattaacttccacaaataaaagaaaccaaaaaagaagtccacataatagcagttagtaaagacactgtctaatgagaatagtattattaatatagatattgtaggtctacactacatgatgtatcatactaacaaataattccattagtaaggaatctgatgtatagcattcgtgcatcaaaatgttagtgtgatacatcaaataattaacacttcaatttttgttcaacaaagtttataccagtagccacaagtcgaactactaaccgagtatctgggttttttttccagtgagaaaaaatagatattcaatatagaaaaaaaaaaaaaaatatatgcactgatagtagcgtaagaatnnnnnnnnnnnnnnnnnnnnnnnnnnnnnnnnnnnnnnnnnnnnnnnnnnnnnnnnnnnnnnnnnnnnnnnnnnnnnnnnnnnnnnnnnnnnnnnnnnnnnnnnnnnnnnnnnnnnnnnnnnnnnnnnnnnnnnnnnnnnnnnnnnnnnnnnnnnnnnnnnnnnnnnnnnnnnnnnnnnnnnnnnnnnnnnnnnnaaaaaaaaaaaaaaaaaaaaaactcagtattttctctggttttacaatgagagacaactcagtggagtaactattggagatttcaagatcttgctcaatgcaacacaaggtaaaactgatgcagtagaagtacaagggcgctggaccacaaggtagaggaggtggattcaataatggcagaggaagaggaaggtttaatcaaggaagaggctcataaaatttcaaacaatgaagctactgtcacaagctttaccacattgaagaccaatgttacctcaaacatggtttttcctcaggttacaaatccaaatcgagtcacactgctaattgtgttgccactgatagtgatctgaatccacaagcatttgagaagagtaacttgtcagcagtggatcaacaggaagccaataagaaacaatacaaccctgagcaattgcatcaacaaatgcagcagattctacacgtattgcagcaatccaaacatattccttcacaaagtgtaagccaagtcagttcctttctttgtgaggcatcaactcaccaaaccattcaacttcattggtttaggtaagcttcaattttattctgatctgtggattttagacactggagcctctaatcttatcagtcataccaagtctcatttcaccagactacatagtattaatcccattaggactgacccaagaataaagcaactaaactaaagctcaagctttagacccactaacaaaaaaatatattttttcttggtttttataaagcaaaagggcatcatatgttgggaaaaaatacacggatgttgacaaaaaagacctactatataattattttttaaaagtaaaatatttttcttaaaatttactttagctctcacttacagtttagccggacataaatcccattcatgtaaaattgcctaatggttcactctggctagctaagtttcctagcacagttcaatgtttaactcatttaaagcttgtcagtgtattatatgtacctgagttcagctttagcctcattttggttcatcaattgatatcggatctttattgtcaattaaccttcactcttctttgtgtaaaatccaatatttcagcactttgaagatgattgaactcactgaaggaggattatactacctcaagcatccgggggaaatcccttagactgttcttctgtttttactaatactgtaaacacacacaacaatgactttgcttttgaccagtgtcattttaggctaggaaatccttcatctaaggttgtttgataaatttttattactttccccttaagttcatttcaataaaaatcaagtttgtgacttttagtgtcttgctaaatagtctagacaatttttccctcatactaatattgttacacatatcctaatagaaggaacaccaagttgtgggaggataaggaagaaaatgaaactcaggttctacttagagctagacatgagtttgaagattggacaaaagcaaggcagatttctgacaaagtttgtgaggttagtactgattcatagagcgattcttggaccaagccacctacaggctttctagaattcaatgttgatgcagctttactcaatgagcagaatgtcacttgagtgtataattgttgttgtatgttactttaatttatttatactattgctatgactttttatttattactcgatgttggttttagcgagttttgttattttgttaattgctttatgaaatcaaaggatcctccacgaggttgcgggattcgtcaaattacttgctattaaaagttatctttagatactttcttacttgtttggtgcttatgttctccatcattgggattccttttttctttatgtaatttaactagatgtttgattttctgggcgggggattaacacagagcagtaaaacatggcatgcagttgaacccttgttcaaacaaatagtaaatgaatttgttcatgattgttcacgtccagaggtaatttatacaataattccattatataatatctaggcaacatgcagggcatagtaattccttcatggtaccagcatgaaggatacattaaggccatgacatttaattgaaaaggagctaaaaagttttcactgccctgaggaggtaccacatcatgttattacttgacttagacaagagtttggttctagtcatttttatcataccattgttattctcctttgaatgttgatagcataatttatatagacaaattaccagttatttttggtttactctactttgtgaattggcattgtgcttctttaattttttatcaagatctttttgtcaacagttgttattcttcatatcttgttttggcattgttgatgaagtttttcctgaacttgagtttcccttcaggactcccagggctaactggaattccaattttgggtcctccaggtggaacggttacaagaagttcttcatatcatttacattaacttatttttatagaatatatggcataatattttttaaataattaaaaaatcgatataatatataagaataataatttttcaataattaagagataaaaaattgtacaataaaaaattgtacatcagccacttaatactaagtaggttcacagaaggtattgacaattgactatcaacaagaggccaaattaaaaaaaccatctttacactttacactttacactttacacatgaattaagtaatatgaataaggccttaactggattagttagttacatctagttagatttgaaattaaacaagacatttgctggtatcaaataaaggagtaaaagatttttttttatctttacgttttaccgtatacccctaaaaggttcactattcagttctttatttttgctgcataattttttgagtgaataatgagctacaattatgcatggcattaaataaaggaagttattcacatgttttctcaaataagagaggctagtaaatatagcatgattccttagtgatgactgacgaatcttgctactctgtttcttccaaggaaaaaatgggcgattcattgcctcattgaattaaagttgtgttgctgaaccttgtgtacttcatgaatttatctatggatcgaaccacagacatcaaaatctaacttatgaattgcaattttctgtctattcaagccaatatgttttatctagttcccttgttaatccacatcattattatctcttgtacgtgaaggttttcatcagtgttgaatgtaagtgatatccaaggtgtggttgccaactatgcaaaagcaagtataccctttgaagttatgtggacagatattgattacatggatgcatataaagatgacaaggatgtaagtgatatccagggtgtggttgccaactattatttagggaccttctccatattgaggtatttggcttgacatgaatgagttatctaatttcattacgtctcctcccattccttcttctaatcttgatcatcctccttataaagttaacaatgttggatatcaacgacccattaatgacagaactgttccatagtgttcatatttgattccttttattttccttaatttagttgggagctttttacccctttgcgagagatcattcacaaataaactccatcaggcaagagctttacatctgagattcagttgcagcatcagctaggaaagttatttgtgaatttagttgtagaataaggaagaaaacttgggcaaaagaaccaaaagggtgtttttttaaaaaatatttaccgataaggtgcgcttnnnnnnnnnnaaactgccatcattctggtattttttcattttttaagagatttttgaaggtgttttgagtaccccagttggctttctgctgaccccgcgaacaagaagggttgtcatctgactgcgaaggatgagccatatccaacatagggtgggcatttatgtttgtgacatttatgtttagcatgctcggtctaactttatttaacgacgttaaccccgcaatgagggttctctcacgttgagtacagtttatcctttgcaaatatatgaaccaacagcactagatttgtaaataattgccctcccaaaccagatttgtaaatagtttcgaaagcgcaccttatcggtaaatattttttaaaaaaacacccttttggttcttttgccgtaaacttgcattttgaattgttatatcaagatagtactaatgtcactttgtggtttatggttgtgttccttgatgtttctatacaaatatggatgtttattaagttattttattctaaggatctaagtatctcttccatgttttatttgtctaggcattgcaattaggccaggattcttacaatacctacgagttgagaagtgaaagatgtcagatgtgcttgggaactgattctttacataaagtgatggaatgtttggcaaatccaagttggtttctattctcgtttttaagatgaaagaggcttttgggttatctttctacatatgaaggggcaattttcttatattaaaccttgaaaaatcttaatgtcatttgaccataaaattgttgttgaacttgaaaatgttatttgttaatttggtttgccattagttctagattttagtaattgaacttaattgtgaagaccctttgtttgcttcagcaagttcacaatttgcatcatgctatgaatcacaattcacaagtaactttgaatcatgtgatgcatatgtgaattggtgtgattccataatgttgatacgaacannnnnnnnnnnnnnnnnttttttttttttttttgcttttcttttcctcttttttatcaaagaaattgaaaatttagattaacttaaattgttaattgaaaagaaacaaaacaattcccattaaatgaaccctatgcattgtcacttactctaaacactgatgtttcattttttagaaacaacgctttctaagacaattctttagaaaatcgtctttgaaaatagactttttaagatggttctatagaaaactgtcttagaaaataaactttttaagacagttttacagaaaatcgttttagaaagtctactgtttaagacgattctttaaaaaattgtctttaaaaataaactttctaagacgattttttgaaaaatcatcttagaaatgtcaattttttaaatatttttaaaacaaaaaaaatacacattctaagacgatttcgaaaggaaccgacgtagaaattgaattcgaagatagtttaaaaatcgtcgaggaaagtgttgatttttcacaacagcggcttcaaaaacgatttttgaaccatagtggaatgtgaaaaacaacttacatggaaaaacgctttttctagtagtgcgatctgatgagcaactccatagattaccgaattatttgacaacttttaattaggtcttgaactattttttttctttttccatttagtcttgaacttgtatttgttttttaattagatcttttatgtaagtatagttatgaaaaattaactgtttgaatcaattatgtgaatttgcagcaaagttcttatagggtgaagcttgtgaaaacatacttgggttcagtgaacatgtagatgtgagaacattggttgaagaacttggttgaaaatttttaggttcaaaacctatagatgtgaaaatattatccttgagagatgaaaatactcatataaaattgtaagaatactcaatatagacctctagacgtgacaatatttttttacactatttattaaactagatcctttaataaacattcttaatataaatatatatttacatttttaaatatttgtatataagagagctttatatgttattttgcctcaaacccataaaatattaggaaagtttttctttttataggctcaaacaatattgcaaacatttgatgtagataatttattccaaataaaatgcttcttgtatatcactcttctgttatagtactatgggacatcaaaatgagaaggaagcataaaatgtatataagtagaaattccaatcgtatcaaaagaacaccacccttattttcccaacatattgtcaactaagttacttagatttacctttaatgttaagtccattgataacgagattcattcaagctccataccattggtggaccaaggtttacgacaagttcaaaattggtaaacgtgctttcttcagccatataattactatgcatttgtaatatatgccatgtgtgaaacaatcgactttatcactcgagagtaacaagtgtgtttacaaagtttgatgatacacataatattgtgatggagattcttgttgttctgtactttctgttcctgccaaatcactcatccttagcatcctcttcgtcgtagttgaagggtagtggcacggacttgaatgcacggtacttgccaacgttgtttaaatgctcattctctatcctgaatcacataaccgtactaatcaatacataatgcaaatgaacttgtgaaataaagtattttggcttctgtggcgtgcaaaaacagaactagcaaaatgtgatttttcttttgccttcgttacctaaagaaactccacacgccacgacgaataatctctaagctggcaacaatgctgaccatggcttgtctatgcaagaaggagaaattgaaattcaatattgtctgtaaccatgcaaaccttaacaagacattcagcacctgtatatggtttgagtaaatcattaacttccacgaataaaagacaccaaaaatgaaattcatatattgacagttagtatcgactttgtctaaagagcatagtattcttaataatatatagacattgtaggtctacactgcatgatgtatcgtactaacatataattccattagtaacaaaattgatatataccatggtgcatcaaaatgctagtttgatactagcatattattagaataggcctacaatgtttacactaacagttcaatttttgcttaacaaagtttatactagcagcgacaagtcaaactactgagtatatggattttttttcagtcagaggtagatgttcaatatagaaaaaaatgtatatgcactgccagtatcgtaaagtgcttttacactttcatgcaaccataagccatcttgtgtaataaatttgttgacttcgagaataaccaccctaaaaatcacaccaaacatgactcctaattggttggcaaattttttatactcacaatgtataaccattaaacttttcaatataaacatcttgaaaattcaatatttttgttgtcaactacataccatagcagcgaaatatacgcttttctgagggattaggagtttatctctgagccagcggttcttggaatgtctttggaggaggccccaatctaagacaaggtcccaatatgtagaaaaaatggctgtagatattgagaatatccgagccaacactttccaacccattccttgattaagagtataagctgtccttaggcaaacagcagcaatagtgaggaagtatttcaaagcattatatccttgcattatatctttctcctcgaacaggcgccttaggcactaacaagagaaaagaagaagattatttggtagtctgagtcatttcttaatcaagagcatgcatatttactttcttaatcaaggacatggacatgtttggataacagttaagtaagctcttactaaataagaactttatacatataataggatcataagtcactttcataagcacagttgtagaaaataaggaacactcacacttaaccaagagttgtagaaaataagacaagggtttaatatatagtaattttcgtaatagaaataatcgattaaatgcgctccccacgctnnnnnnnnnnattaatccgataaggtaatcgattaaagtgttcatgatgattttccagaaagcttatgaacaaaataatcgattctatagatgcagtaatcgattaaagcagtcttaaactatttttccaaaatattaggctttctctttagtttcaaatcaattctttaaagtctatatgatgcaatgcttagtatgtgtatgaatgatatgtatgcaaagcttggatcaccatagtgctttcaatccttttgcattaaatcacaaactctcatcttcagtctttaagctcatgttgaaagccaaaatgtccaagtcttcatgtatttgattctccgaaatcttcatgtagctccccctcaaatcaacaatctccccctttttggctttaaacatgtcaaatttctaattgaaaaacaatgggtctttgtgattgaatggaaaagctttacacgttcctgtactttacttaacacctgaaaattcaaaatttcttcccaagaacaagtgttaaagatatctgagctttatttattaatcattcctaacatacatgcatcaatagcaatcagtttcaagacttaactccccctaaatttcccaaattatgcaactgtaatttttgatcaaaaatggcacgaaaaacaggggcaaacagagtatgatgcagagcactttcgttttcacttgattttcaatatttggtattctccccctatttggctttttaaagtcaaaaaatttaatgcacagcggataaatgatgaacataaaacataatttgcattaatctaagctgaggagttcatacgaaggctgaaatgaagaaaaaaaaatacattgaaacttaaaaaattaagactgaaacataaaagctaaggcctaaagttcttcagattcttcatccatcctcagtgtagcctctatgccatctagcctttcattaatctccctaaaagagccttgaacttctgctttaaattcatggtgcatttgcagaagcccatccattttagccagcatcagggattcaaactgagaatgaagaggctgttgagaagtagcttcttcatttgcagaatcaccatagagctcttcactatcagcaacaccaggttcctgttgctgaggcatttgttgaggctgtggaggctgtccacccataacccagccatcaggggtcttgtgcagaccaagcttggagaggtgttgatttgaggaattggtgttgtctaccacctcattagacacatctatgccaaagtgatcaatgaatcttgacactaagacaggataaggaaagggatagttgacaagccttttttatttcatcattatttcttggaaaataagaacccaattcattgggatggaattgagaagaccatacatcaattgtaggtcttcatcagtagcttgggcatggtttgttgccttgggagtaagaatatatgtgatgaggtagtggagtagcctgttttcaggagccatagggcctgtactcaacctatttttgatgggctgattgggatcactaagacacgccctataaatacctattttggtgtagccaccaggggtttcttcgaactttctttcaccatcatttgttaccccagccactgtctcccatatttcaggggtaatcagcatctccactcctttaaccttggatttaaagtacccttgcattgagcctttaccacaggtgtaaaagactctcactaggtcagggtaaaaggtacccttcatctccatgaaacgcctaagaccttgggtctctagtaaggctggaaacacaaaaccttcctttataaaccaatctatactaatgtatttgggtgaggagataggcttggtggcattatactgcagataagtcattttatctgcttctttatcaaaccagagactcaacctatcaggtggaggttggggttgggggtttgaagacgattctcctacctttctcttaccagttctaactctctttggtgctgacatgttgaaataatcacagaaaagagtggtatcagagaggaaagatggtagttagagcacaaggatggtatcagagtaagaactaaggggaggatagagaagacacagagaagagaatgatctttggtgcaaggagcaattgaatcacaaagctgttatttataggcacaaattaagcacaaaatggttatgattttgaaaaatatagctgttgggagcagttaatgcaagttagtggaggtttaaggaccaaaatccagtttattggacagttacgaaaattaaaaatctgtcagaaaacgtataacagcttgaataatcgattatttccttatgtaatcgattatttcagaggagatatgacattttaaactatgtaatcgattattcagcaatttaatcgattacagtattgatggctagaagttgaagatgattagtaatcgattataatgctaacataatcgattataaggccatggattaaatttaaatcatgagtatgaacattttaatcgattaaaccgtatggtaatcgattattccagcacgccttaaatttctaattttattttataatgcagtaatcgattatcccgataggtaatcgattatcacagagtggcatagcttttcattaatgaagcgtaatcgattacaggtcttgggtaatcgattacaagagcttaattttcaaacaaaacttgggttttaatgaaaataatcgattatcccaataggtaatcgattattacagcacgagaagcagaaaacagagctttttaacattctgcacagcttttaactcttgggtacagagcatattactaacaatacaacttttaaagtattgaatcagagcattttgatggtagtacagctttttattttgtttcagctatgataatggcaagtaaacattcaaaattgcacataaagcatatcacaaacatgctagcatatattatgttcatcaaggattcctagcatatttctaagagtgtaaaatctatccttaggcagaggttttgtaaaaatgtcagcaagttgatgatgtgtatcaataaattctacctttatgttacctttttgcacatgatctcttataaagtgatgtctaatctcgatgtgcttggttcttgaatgcatcacaggattctttgaaatattgatagcacttgtgttgtcacacagcagaggaatctcctttaactcaactccatagtcttgtagttgttgtttgagccaaatactttgtgcacagcaactaccagctgaaatatacttagcttctgcagtagataaagctacacaagcttgctttttgcagtgccaagaaataagtgaacnnnnnnnnnnnnnnnnnnnnnnnnnnnnnnnnnnnnnnnnnnnnnnnnnnnnnnnnnnnnnnnnnnnnnnnnnnnnnnnnnnnnnnnnnnnnnnnnnnnnnnnnnnnnnnnnnnnnnnnnnnnnnnnnnnnnnnnnnnnnnnnnnnnnnnnnnnnnnnnnnnnnnnnnnnnnnnnnnnnnnnnnnnnnnnnnnnnnnnnnnnnnnnnnnnnnnnnnnnnnnnnnnnnnnnnnnnnnnnnnnnnnnnnnnnnnnnnnnnnnnnnnnnnnnnnnnnnnnnnnnnnnnnnnnnnnnnnnnnnnnnnnnnnnnnnnnnnnnnnnnnnnnnnnnnnnnnnnnnnnnnnnnnnnnnnnnnnnnnnnnnnnnnnnnnnnnnnnnnnnnnnnnnnnnnnnnnnnnnnnnnnnnnnnnnnnnnnnnnnnnnnnnnnnnnnnnnnnnnnnnnnnnnnnnnnnnnnnnnnnnnnnnnnnnnnnnnnnnnnnnnnnnnnnnnnnnnnnnnnnnnnnnnnnnnnnnnnnnnnnnnnnnnnnnnnnnnnnnnnnnnnnnnnnnnnnnnnnnnnnnnnnnnnnnnnnnnnnnnnnnnnnnnnnnnnnnnnnnnnnnnnnnnnnnnnnnnnnnnnnnnnnnnnnnnnnnnnnnnnnnnnnnnnnnnnnnnnnnnnnnnnnnnnnnnnnnnnnnnnnnnnnnnnnnnnnnnnnnnnnnnnnnnnnnnnnnnnnnnnnnnnnnnnnnnnnnnnnnnnnnnnnnnnnnagcatgattgatatcttttggttcaatttgagaaacaaaagccatgtcacaacataaatttcttagtgaggatctagtagagactccctttgatacttcaccaataatattatctagtgaaagatctcttgtggttctccactcctttggcaattgttttggtgttgatgaaccttcttcaacacttggttcatttttctcattgatggacatcttctccaattgaatattctgctctaagtttcctgcatcatcatcacaaactttttcctcttttgaggagttagattcatcacaaattacatggactgattcctcaatgcacatgattcttttattgaaaactctatatgccttgctttgtaatgaatatccaagaaagatagcttcatcagcttttgcatcaaactttccaagtaattcctttccattatttaaaacaaagcatttacagccaaaggttcttaagtgagaaacattgggctttcttcctttatacaactcataaggggttttcttcaaaataggcctcatgagaagtctatttaaagtatagcaaactgtatgaacagcatcagcccaaaagtatttgggtaaatttgtttcatttagaagtgtcctagcaccttcttcaagtgacctgtttttcctctccacaacatcattttgttgaggtgttcttggagctgaaaaattatggttgattccattttcttcacagaatttttcaaaatcttcattttggaattctccaccatgatcacttctaattgaaacaattttacactctttttcattttgtataactttggctaattttcgaaaagaatggaaagcatcactcttggatttcaaaaacaaagtccaggtgaatctagagaaatcatcaacaatgacaagtccatagtaattgccccctaaactcatagttcttgaaggaccaaataaatccatgtgtaaaagctcaagaggtttagaggtggaaacaatgtttttgctttgaaaagagacttttgtttgtttcctcttttgacatgcatcacacaatttgtccttctcaaacttgagttttggcaaaccaataactaagtcctttcttgattagcttattcatatgatgcatatttatatgactagctctcctatgccacaaccatgtttcatctatcttacttaataaacatgaggttttgtgaaacaaagcatggtcaatagagagtagatacacattacctttccccttgcctatatgaattacctcatcactcttgccatcacaaatcaaacagcaatcttgattgaaggaaatcttgtagcctttgtcacataattggctaatgctaagcaaattatgtttcagcccctccacataaagtacattgctgattttggtgtttaagctgtcaccaatgcttccttcacccataatctttcctttgttgttgtctccataagtgacaaaacccccttctttaaatgtgagattcttgagcagggacatgtcacccgtcatgtgtcttgagcatccactatcaaggtactaaagagatgagctagctcttagacacacctacaaaagaaacaaattacttcaaaggaataggtacccattttcttatgggtccaagtgggttagctgttttctttttcttctctacccaaatgcactcaccatttgggacatagaaccttcttgcaaaacaatgaaaagttgtatggcctctttccatacaatagtgacaagttacagcattgtatctatttctagaaaaccttctttgattgactcttggctttttcttttgctgctgttttgggagtacaaacttagtactttgaacatttttaaagctccttttataacccaaaccagaggtgtctccatactgtttttgggcactcaacatttcatctagatcacattttcccttattgagcttttttaagatgtcaatcaattcttggttctttgaaacttgctgcatatacttttcttcttgattgactctgtattcatcaaacactttttgcagcatttcatacttgtcactagaagtagaggaagaggtgcacatacatccacttgatttgtaacttgaggtcaaattttcattttctttcttcaggttacaaatttcagtttccagctccattattttggcaagatgttcttccatgctctttttaagcttgctatttgacttagccagctttttagcttctttgtgcatctcttgaaatgctaaaatagcttgttcaagttcagaagttacctcgtcatcttcatccagcagatcatcattttcttcattgnnnnnnnnnnacaaaaccaaatgaatatctttatccaatatcaattcaagacttgttatgccacaagattaaatacacaaaacagagttcacacaagaattaatcaaagctatagaatgtaaatcaaaacacaagatttatactggttcacctcaaaacctatgaggctacatccagtttcttctactcaacactagagtagagtttcactattgcaaatataattcttacaagcaattacaagcttctcttcatcaaccctagatgaaattcagagatctaaacacctattagactcttagaagccaaacccacactgagaaacctactcagctgtacttggagaaaccgtatctcccttggagaaacactatctccacttgcaagaaaaacctcttacaatagaatcaacaaattcaaagttacaacagaaaacttaacacccacaaagaactaggaaagaattcacctgatgatccaagaatgaaatgcatatgaatgtaaatctcaggttgaatgcaaaccaattatgcagaacagctttcctaagcctttgtgaaagaatggcttgcttcactaacaagtttagtgacccatgaatgaatcaatggaagcaagactcacagaaccaagaatattgccttagtgacttcttagaatgctcagaatatcgaaaagtttaagtgtaatcttaatctctgttagttgttaatcacaaaaaggcaagggtttaatatatagtaattttcgtaacagaaataatcgattaaatgcgctccccacactcctgtaatcgattaaattgtttaatgctggatcaggatttttgttaacgttcaaaataatcgattaacccgaggcgtaatcgattaaaccagtctgggcaagaatcctgattgtgaagtgtaatcgattacatccaattgtaatcgattaatccaggtaatacataaatcatgtttgtaaaagataatcgattacattcattggtaatcgattaaaccagtgaagtgtaaaaacatgaatgaactaaaataatcgattacaaggattggtaatcgatnnnnnnnnnnagcagagtgactgatttttccaaacaagcatgtaatcgattacgacatcatggtaatcgattaaaacagtcacaaggccaaatcttaagtatgctgagattcgtgtaatcaattaatccgataaggtaatcgattaaagtgttcatgatgattttccagaaagcttatgaacaaaataatcgattctatagatgcagtaatcgattaaagcagtcttaaactatttttccaaaatattaggctttctctttagtttcaaatcaattctttaaagtctatatgatgcaatgcttagtatgtgtatgaatgatatgtatgcaaagcttggatcaccatagtgctttcaatccttttacattaaatcacaaactctcatcttcagtctttaagctcatgttgaaagccaaagtgtccaagtcttcatgtatttgattctccaaaatcttcatgtagctccccctcaaatcaacaacaataactcaacatttttaattaatttccaacatagttgattatgtaatagaaacccttgcaaatgctccttttgtggttgtgttcatgttagaaaaactaattataaaatagggtataagagtacacaaataaaacagtaagatcaaacaaaaatagtctgtaggactatacagaatggggtctagtgaaaaccattgcatacatcaagtgtaacaccccaatatttttatactttgaaataatactttggaatggttagaaattatatttttctaattagtaagacatgtagaaatttatttagagaaaaggattaattctagctaaccaagttatgagaaaattttgtaagaaggataaaactaaccctaggagttttcccttaatttaaggttaaagaaacttagctattgaaatgatttagtaattttgtaaattaaattaaccaaagaataaaatggtgaactcaaaacaaaacaaggtgtcatgagcaagagatggaccgaatggttgcaagagaaaagaatgaaagttcaaattgggtgaaggctatttaatggctttaggaattggtaggttttaagaactttaagcccaaaggaccaaaccaaaaactgaattggaaataaaggtcataagccacggtggaatgaagataaagcaaggacagcaacttaatgagggaggggaccacatggagactaagtcaagataagagggaataagcattaaatgaagggaatctctcccaaataatgcaggctacggttggaggagaggaaaaactgaaagcttgatcttatgcacactaacaccgtaacctttgagggaaataagtggaaaagtctacttggttgtgattggtggatcaaaaaatttgaaaagtcttccttgcatcccattggatacccctatgactttaattgatcaaaacaattagcaaagaagaaaaagctacggatggcattccaattgaagcaaaaaccgtgagggaatattggggagacaaaggtattaatccatgtgtacttcctagtttgtgtggaagctggtcattggaggaaggcattaagagataagtaggcaattaattagtgtgacataagctaagctttatataaggactgagggagagttagaaagctacggataccatctcaaaatagcaaagttctgtcacttttcattttagccttttgtgaacaaacattcctcttgctgaccgtgcctttccttttcccaaatcaccctatgctctcaatcattttcactacctaaccatgaactaaaaattcaacaacaactttggagaaggtcacgtgtagaaaggggaagcattctacagccaatattaaacttagtaatccaactaaggtaagggaagcttgataaattgaatttaattatatgcaagaagtattaataaataatgtaaggttatgaaaaggaatccagaaaatttagaatcttagaaatgaaatcagattataggcttaagagaaatcaaattataaattgataaaaagtaattgaaaccttaggtaggttacgtgcagtagtttatatgctgagaaactatggtagttgctatgtttcatatttatatttcatgagttaagttagttatgaaattaaattattattgggtatatacctcttaactaaaattaaatatgtgtttaattgtaaattaagctttcggtagtggttatgttccatgagtcatgacatttatattccttaagttacgttgattataaaccaaattctgcatatacccttaaactaaaattaattatgtgtttaaatttctgcaattatgttattttaaattgtgaattctgcaagttatgttatttgttgttactggatggaattatggactgtatcaccttttaattgtgttatcatcaaaagctttaataataataagtaagggactgttaatagaattaattaatgaaatttggttggacttcatgaaaaccctatgttatggtgagactatgttgagaactctgggatgttatgacattgatactgtgataagatgataatgaccctatgatggaactgtgatgttaagatgaggactctgtgatgactggggatggtgattctatgatgatgactttaaaccactaaaaatgatgatctggtgatgttgtgaatgatgaaataataaattataagatgtaaaataaacaagtgttgcatggcatgtgcatgggatgatgagatgataaatctcataaagagaagtgtcagataactaaactgagttccatacgtgtttttaacttgggggtggttgagacagtggggaaccacaccaccatgatgatcacatggatgggagtgagactcctgcgcgacactgggctaccctgacgggatggataggttcgttccactgcgttgagggtggggttatctgacagtggccacaaattttaagatgtgctgagatctcagtcatgcatcatttaaaaagaggagcatgcactttcttatctgttgtgcatgaaaatgagggattaactttaataatgactttatttggttctctgtattttaattgcggttatatatgttatctatcctgacgtatttaatatttctgtgtataattaaatttggtttatcatgacttaccctttttgtgtcttgtggttgacacctgtgatgaccccaaataaattgggcgagcagaaaaacagtgaagtggattgtactagaagatgtagccgctgtgaattactatctctgctgattgatatttagttctatataatggactatttctgtatgagctatggacattttatgggttgtacatcatggactgtatattattactgtgtgatatatatttatggagacgagaactatggttatactaggtaattatgcataaatttcttcacgtggtaaacgctattttgaaaaaaaaataatcaaccactttaacttgaattgtaaatcatgttattattgtttttatgaaaaacaaatataaaatactagcatgaaatttttaacaaattaacaattacaaatatggtttttgaaataattacgtaagagaagcggttgtttcatcaagcttctgactgcagattggtacgggatcttctccatctcatctctgtcttcatctgatctcggactctgcttcttactaagctttatgtgcccggctaaggggtgctaactgtcttggctttgtccatattgaatttcttcaagatcttctcaacatatttctcctgacttagccacagtagcatcttctttctatctcggatgatcttaattctgagaatctgctttgctagtccgaggtccttcattgcgaaggacaagttcaatgctttcttcaagccagcaatcttcatcttatcttgccctactataagcatatcatccacatatagtagcaaaatcagaaaatctctagtctcatacctcttcacaaatacacaatggtcagcttcagtcttcatgaacttgtgatcagtcatgaaggattcaaactttctgtaccactgtcgaggtgcttgcttcaagccatagagactcttcatcagtcggaatactaaaccttcacgtcctggagcttcaaacccttaaggttgctccatatatatctcttcttccaactcaccgtgaaaaaatgtcgttttcacattcatttgttctacctcaagatccatcgtagctgccattgctaaaacagttcggatcgaggtcatctgcacaacaggggagaagatctcttcaaagtcaatcccctttttctgattacagccttcactacaatccgagatttatatctcggcttctagtcgttctcttcctgtttgatcttatacacccacttgttcttcaaagctcgtcttcctttaggtagctcggtcagctcacaggtctgattctcatgcaaggacctcatctcatcctgcatggccttctcccattcaccactctctgggcttgtcacagcctcatcataactctgaggctcaccatcttcagcaatgacagtgtattcatcatctgggtaccttgtagaaggtcttctttctctagtgaggtatctcgatttttcttcctcagcctcttcagatcccggttcttcattctcaacccggattccgatatcatcagcttcttgctggttatcatcttcaacatcagtttctccccctgcttcagctcgtacaagagggacgggttcttcacgtcgaacagtaacccggacttggggcttcgagatgtcataaagggtctcatcttcatgaaaaatcacatcccggcttctcacaatcttcttattgattggatcccagagtcgaaacccgaactcggtttttggcaaaccgaggtaaatccattcctttgtctttgcatcaagctttgccctttcatcttttgaaatatgaacaaaggctcggcacccgaacaccctcaggtgatcataagtcgctttccagccttccagacttcttctggaatttctccttcaagtggccgtgatggtgagaggttgatcaaatcaactgttgttctgacagcttctcccgagaatgatttcagcaacccggcatttgacagcatactttggacctttacttcaatagtccggttcattctctcggcaagtccattcaattgcagagtcttgggggcatcttctcaagtcggatcccggcttgactacaataagcatcaaagggaccgtgatactcaccaccattatcagatctgacgaccttcagcttcttgtcagtctctctttctaccatagcatcgaactctttgaatgattggaggacctagtctttagtcttcatcagataaacccacactttgcgggaatggtcgtcaatgaaagagacaaaatactgagctcctccaagtgatttttctgacatggagcaaacatcagtatggacgaggtcaagaatataccttcgtcgtctgggttgatccagtctcacaaacgaaatccgatgctgctttccagctaggcagtgcgtgcaactctccagcacttgtcctttcaacccgatcaatagctctttcttttccaatatctagagccctttctcactcatgtggccgaggcgcttatgccacagtccaagctctgtccatctcgaatggcattggtttctccaccattaatctttccttgcatcacgtacaaggagccttctttctttcctcgggccacaaccaagtttcccttggtcagcttccatctacttcctccaaagtagttcactaactcggcatcatctagctttccaaccgagattagattcagtcgcatgtcaggcacatgccttacatctttcaacataagtcgacaccctacatctgtggttagggttacatcaccgacaccaacaatcttgttggtcacctgattcccatcttcacgacaccaaaatctccttttctgtaagcagagaagaatccctcatgtggggtgacgtagaatgaggcaccggagtcaacaatccaggtgcagtcttcatgggctacattcaaatattcttcaccaagacgaaatatctcggcattagcatccacagtcgtggtactcttatcatgcctcttcctgggaacaatctgattcggcttcacacagccgctctgtttatcattttgcagagtcctgcagtccggcttcttgtgtcctatcttcccacagtagaagcactttaaatcatactttgacctagaccggcctctggacttgtcacgtccgtcatgaccccggctcttgctacgaccccgaaagtcggatttacttctattctcagcaacattagcctccaccgtgctagatgcaccccgttctcttctcctggcttcttcattcaggaggctgtctgacacggcatccattgtcaattttccttctggagccgagttactcaaagtcactaccagagtatcccagctttctggtagcgaactcaataacaacaaagtctacatctcgtcatcaatcttcatattggccttggttaactgattcacaatacctttataggtgttaaggtgctcaatcatactcatgtcatccttgtattcaagctttacaagccggcgaaccaggtgtgctttgttcctgggagtcttcttctgaatcatggactctagtttgttccacaactcgcaggcatttgtaaactcagccacgtgctcaaagaggcttttgtcaatatatttcctgatcgtggccatcgccttacgactcaggacctcccaatccttgtccgatttcccggtcggcttctcttctaggacaatggactcatacaaatctctgcaaataaggtgatcttccatcatcgatctccagtaatggaagttgtccgtggtcaacttgaacatatcaccatcatgagtgataccgctggtctccatctcgtctccctcaaaacccgtcaaaccgggctctgataccactattgggtaaaagaggaccggggtgttctcaataccctctgttgggtgaaacccagtgtgcgctgtctatacccccaaacacatatcaaatcaaaatgtggaaacgtaatagattaaaacaaggatagagatggagaaaatcacacgaacaatatagctttacatgggagaaaaccttcttcaatgtgaagaggaaaaatccacgagatcaaatctagaattaaatatccactataatggtaacagattacagaggatcacaaatacactacgttggtggccaaactctacctctccaacaatggtgatgatcaactaaacctagagtgtttcactcagactctctctaggaatctctcaaatgcaaagcacgcaggcttgctcaattaggcacttaagaatgtcatttgaggctctcaaaggggcggagacactctcacgctcaaactctcaaggacgcctctctcaactctatgtgtggacgtcactctctgtctccttttgcctccatctataaatgttatatttatagagaggaattaggtttagggatttcagcaccctaaacgggaatggaccgaggtcagcgccttggaaattgggcccaagtcaaactttccctttttcagtacatagagatttggaccaaacattaaagcggaaattatccaacaatcaccactaggctaaaaggtaagcatcattagcctatgcatacaactagctttttctgaacataagcagactattcttgaaataaattttggagaatactcttgcgaattccaatgcacggtaataaattcgaatgcatcaaatgtaaaattgttaattctagagtaaaagttcttttaagctctccttagtctaaatatgcttcttagaaatcaagaattgaaatggtgaaaaagagaaagaattttattacatataagaaaagaaataaaaaagaaaaaagaaaattcttctccaagaatttttttatcacaaattcttttttctttcataaagatgtaatactcaatttacaatgacaacaaaatttctcctctctcctatcttttttttcctatttatatctaataaatttttctaactagttaatagtctatattaactaactttcccttctccttatttcctaacatattcaatctttaaccaacatttgcaagcaagcaatcaaagcacccattcagatatttaatgcaacagctagaaaatctcaatttctaaccgtatcctcttttttatgactaacaaggtcaattatatatgcagtggaaaacggtatgaagttgtgtacctgaagaaagcgtgaccagtatggaatcgcagcaacaatgaatgaaaaagctatgaatatcctatttgacttgcaaaatgtttctgtgtttgaagtcaccccaaccatagtagcatatgtagaactcaaaacttctcaaggcttgaacctgaactactaaagaggattattgtgtctgaatgatatcaatcactgaagggacaatgagcataaagctatagcatggcagattgaaaagcaaagtataatcctattttggcatttcactgacctggctagtaaattgatcggccatgaagaaatctggcagtgtgacctgaaatcagtgttagatttctttaattaatcattgtctaaataagtggggttctttagtaacttggctacaatttttctttaccttgtacaaaggagcacagatgcagtgacacacacatgtaaggaagaacatacgacttgatcgatatacaatgtttaatgggcataataaaatggcaatcacactctgcagagcaaaaatccattcactaaataattttagaaacaaaactcaatgacaaagttaatgtgatagagaaataatagccttaccagaaccaggataagtggcaaaagttcagtgaatgctttgaattgttttgtcactggatctatttgcatgtctagatttgcaagcacactggctagtgccaatgctgccaagacaaaactaacgaaaaggacttgatggtagcctaagtcagtgccttgcttaaaaccaaatatgaatgagtgattcattctgtatcgcctccagaagtatatattagcagcatacatcagcatgtgtaaaactacaaatccaaataaactgcatagagaattttaaaaaggtaagttagcgcactacatttattttttttaatcagcaaaaaagatgtatgatatatgatggcacaatgggtgcaaaaaccatttacaaaaatatcattgaggaacaaggttacccaatattaacatataatacatattaatatggcataacatatatgtactacattagtccacttatttttcagattagaaggtttaagagttacgagacagacaacacatctatttcaaaaaatatgcatataaagtttacctgtagagaggaaacatgatttccatgtactgggtacttcctgaatgatccatgattttacgggcacgaacaattagaataagggccactgttagagcagcagagcatccggcagaaaaacctgtgaagcggtcatatgtcatgttaagattgttcgggactattgaataagtgatggtctcagaccatgtaataatttcttatgaagcttatcaacatagaaagtcaaggataaaggacacattacacaccaaattttcattatatatatacgcacacgcactaactactggtttaccccatggaaaatgtaaccctatgcctttctctctttggttttggtcgcaggattctcattcctttatttcgattcgagttggaaaaatgcttaatgaatacattttccaccctctccataagcctagtgacctgcagggaaacgtgattcataaggaaaagcaaataaaagcatttcatatatgcattcaaaacgatgatgccaaggctaattaggtccacactatacaattctcacctcatcagagctcccaaggttggacatatcaaccattttcatgtaagcttttgctgcacctcttgatgtgatctaaagcatgaagcaaaacaaggtgaatatataattttgttttgctttaaggagaggcttcaactcccaagtttttgaaggatgaatagtttaccttatcatatttcttcattatctttgaaaatgccaacacatttagaaagctgtttcatgaagaacaaatccataagataacgttaagacttaagacaataatacatttattatgtgacaaaagattgtgatagcgtctattacgtgtagttctttagaagtctaagcttttgatagaactcaatgaaagccagtttgagtgtttcttcaactttgctcaaattttccttggtgaagtttatctctgtctggccagtgtatttgatgaagcctcttatagtcgaacgaggagtctcacaagtgttatttagttgcactcggttaagtatttccacagaagcaggtcttatgggtttgatggggctgagaatattcttcttcttcttgttctgtacttcaatacttttattggtagtttcaatctcttcatgacctttgtcatcatacccagattcctctgaatggccacgatgggtacttccttcctctttgatatcttcaattagtgttggaactcttcctgtccgtgcacctggaaatcactcaacacataaactgagaacttctccaccattcagtttaaacattagaattgaatttatttctcccttggttcctaatagattttttttttttttttaactaattcatgttgattaagaaaataatcaatttacgttatcacattaaaatatgtcaattatttttactatcatttcaaaattattctttttttatcttatatctactaaattatttctcattaatggttaaagagagaataattaaataaggatgtgtagagaaaaaaataattaattcatttaaaaattaataaaaatattataaaaaaggacaaataaatttataaaaataatcttttaattaggaaacaaggagtatcaaggaatttaagttatacacccttttctgttaatttgtaaaacattcaccatagattttagtatgttctattaagaattaattattctgaaaatctagccaaatgttgggagaatgatttttaaatttaaacattaaagatcgagagatattatgttattttattggggattcgttttctcttttaaaattagaatgcacgaaccaataaatacaagctattgaaataagaagaatcggtcaatgtgaagagcaatcactgtctaagtgaaagagggtaatataaagggacaatttttcaagtttatctaaataacttgtcgcttatttgagataacgaataaatactaagatgctctcctaaacctaagtataaaaatgtcgaacacagttaaacttgtgtcctttcagtatttctatattgtgtattctatatcctttgatcctcgttagagtgaaggggttgtttcccaacagcaacttcataagatcaaccattattttttaaaatatagcccccacacaaaattgagcatatatatggccatattttacacctagcaatgtaaaaacattgattaattttctcgtaaatgactatatgcccatgtgtgcaaatagtcaagtgcgatttgaaaacacattctaatggatttgacaatctgtctattctaaagtgaggaaaagtaaaataaataatctttatctttaatgaaaggttaacatattaaccattattttttcagcagcaacgaagattacttactttatcttctaaagtcaaaactgatattattttatctactctctataaaagtaagttgcttaatttataagagagtgagatcccatattaattgtggaatttaactgtaaagtgaacaaaagtaaagtaacccaatttaattagtttagaagaattgccttgattggaagagtctggtcccattttaatcatggaatttgactactacgaagtcagcaaaaaagtaaagtaactaagcacccctgactgagatcaatttagccacaccttaattatggttaaaatcaattctacaagactctaaacaaacacacaagaaggcaagatcagatgtccaaataatctactctaatttaattgattgaataaaatatgtaaattattgtaaatcctctaatacttatttatattcgattcctactaatcaatttaaccacaaattaattatagttaaaaatcaattttatcaaaatcaattctattagattttaaacaaacaaacaagaagacaagatcaaatatggatgatgtctaagaagtctaacgcagttggttaagtgaattgttataaacacctcagtatttatatgccttcgattcatatggataaaacaggctttgattcatatcgataataaaagaaagaaaaaagggaagatgaggatgaaaaaacttacggttcagctggacaccgcggggtgtagaagcgtgcaatgccgtggctgaagcagagacatcagaagcaagacgagtcatctcaacggagcaatcaaacgacgcagttggatgctcaactttcaccctgaaagccaccaaagcatccatctgtttgttcaactcagcagcttccttcatcaccttctcaacttttgacttataaaacttgtccactttgttgaactcatcatcaagcctcttgaagtacaccagctcgcactctccaccttcttccgcagccatgagaaaagtagtctcgtacttcacatgcccatctcgcagcaccgaatgcaccaaaatggattggttttcgatgtcgtgttccgggctcaccggctggtagtgtctgtggtgttgcgtgaggccgctgaaggttctgtgaagtgataactttcgcattagcacttctgctggggtggcacttgaatgtggcttctttctttgcttgtgaagaatgatgtctttcaaaagagactttaggtagccatagtccatgtatgcttcttgccattctggtaccatttgtgcagcaaattccttgccaaacttcattttaatttggccttttttgtgcaatctagatagatagttagggagactcttgtagcttctttggtgtttgataataatatgaactatataaggggataatgagagtgaataatgagaagtgataatggatataaatatataagcaaaataatgcaaacgggtatagaagtgttaagtggcttctgatctttaattaaatgattggtttgtatttcttaattaagtgattcaagatttgaattttgatggaatttttatttatagaataaattgtgttgaaagaaatttttttattttatatatttatgatcttaacgaaaatttattattattttatatagaaataattttgtacttaaagaaaaaaataagcaaaataatgctccctatggaaagtgataataatctttgtaaatggacatttagagaggttttgattaagaaaagtggagtccacattgtccatttttttattttttttttgaagagctaatgacagatataaaggtacttatctgttttaatttcctatgcgggtaataactggttgacggtgtgtttctgcataagtggggcagtgactcttgaatgccatgtaatccaagatccaagaaaaaagtaggttaaacatatattgtgtttggttaattggcaacactaattttgagacccatgaatcaagaagtttgtgaaaggaagctttgaagtaagcgtaagtttaggggtgacggaacagaaaaccaaaactgggataatagcttaagaaactatttgaataaatttattcaaaaaggatttttaaggggagaaattacgtagaaaaataaaaagaaataaatattaacttatgtattaattaatttgtaaaataaattcatcatttagagaaattgtatggagagttcttacaaattaattaatagagaaactaatatattttttattcctgaagtttagtcatttttttttgttttttaaaaaaatgtttttgacgtttggtccctgtaaaatttcttttgggggatttggttggttgctattattttattttaatccttctaatatatttattttttgttttaatttttataatatttttcattttattataattattagattttaagaaaataaaaaataaggatgaaaaataatnnnnnnnnnnnnnnnnnnnnnnnnnnnnnnnntatatatatatatatatatatattcatcaaccgctggatagaatagcctaaatcttgttaaattgatgcatgggagagttacatcctgtaatctcacaaattcaggagtaatgttggatgacattaactactcactacaatacacgtatcaatcactcaaattgtcaaccactattttaatcaaacaaccatgttaagtcttaatttgaataatattttaactacagtatctaagatcttggcttctagttaaatcctaaggtatctcgacagtgaaattaattttgattttggttaattaagtgccaaaaaaatgcttgcttaagtgcaaattacttggttgaattcaatggtcaagacttttttctattattcattgcaaggagctctttggggaacatgaggcttgttctcaaacacatccaagccaacaccacaaatttagctttcatcaaacacttgatcaattccttttaatcaataagacactctcttccaacattgtcaataaaccctccttttcctaatgccaaaatgacttccctgttaaaagtttaataaaactaaaacttaggaaggaaaaaaaatgaaagacattgatcgatcgacgaaaaatttagaaatcaaaattagaaattacaaaatgtaaaaacatagttaatcctttaaaatattatttcattaattcttcaaataccttagaatctttgtcttgaattatctgaccacactttttttttttttaaagcaaaacaaatttacttaatgaacataatgaacattacatatagcacaaggagtgccatgcacgtggtaaaaaacaagaagccgtgtgctggttactaaccccccaatttattatattcgagacttgaaacaaaacaagagcaaaaaaacaaaacagcttccccaacataattgctacagatagtcagatatattctggtgcttttaacgccaacacccccctgtacggtgcatattactcggtcttttacggtatgtttgattagatggaaagaaaatgaaaaatgaaaaaaaaataaaatttgaattaaaaagaaaataatggaaaaaaaatttaaatttttatactataaaaataatttttattttatttttctctaaataagtagaaaataatatttctgttattcgtgttcttttttattttcttttctttcacttttttcttaccaaacaatcattagcgttgagttgaataaatttattcagaaatatttttcaaaaaatggaaaacaaaggaaatttttcataaattaagattaacttataatataagtatttatagaaattttctaatgtaacttttctaataaataatttttaacttatatataagttaattttaatatataaaaatgatatttttttatttattttcttctttgcataccacgtgattctgaaatgcaacgcgtatgtctctcactagctgagggtaaatcgatatcagttatcacgttaattatattatattatatcatattattaatgtgaagtggatgctaaagttggaattcaaacaattgactagtgaaaaatgagggatgctaattgcttttgactgacaccgtagcaaatgggaagggaatatagttattatgttctctatattatagtgaatattgctagttactctgattaagtggactcgtgtaattgtgacttggaataaatgttctgaaaatcggtttggtcattaaattggttgaggtaatgggttaatgatttagtggttcagttgtctaatcggtaggtcagtaattgaaaccagtttgaaccggtatatatattaaaaatttaaaattatatatgtattattatatataagtatataactagcattatttgagtaaaaaaagtttattcatattccaaaatttaaaataactattgataataatccaaattttttaaaaaaaatccaaaaaacacatcccaaaaagacaaatcccaaaaaataaatcggattggtctgaccgatcgattttgaccgagtcaactgcatgattggtttaatgacagaaccagaccgattatgagactggttcccagttcaaccagtcgatccgttccgatttcaataacactcttgtaattcaagggaaaaggttcatgcagtgtcatacgtgaaagacttaaaaaatgtttttttctctcaaaataatgaatatattttttaagtttcttaaattaaaatgtatttttttaatctttaaattcataaaatatttcttttttagtttctcttacgggtaaaattaataaataattaaattaattatttatttagcaaaaaggtgcatttgaggcaatatttgggcatttggggtaccctaacacgccctgtcagggcgtgttagggtcccctgatgcctatatattgtccgttaaaattactttgtacaattccgccttctctctagaattaggtctgacttctctctagatattgggtgttgatttgtctgaagtgaagccttgccgaattcgaagcgttgtcaacgagtaattagggttctgtgtagaagttgctgtgcttcaggatctacagcttgggataggatattttgtgaagattagcgctggaaagaagtaagttctaaaccctaaacaatgttgcatattatttaaagttgttagcgacatagctgttaggttcatagtgtattgtgtttacgttttagggtttaggtttagtgttgatattgtgattagggtttatggggcgagcagggtttatgtggttcggcttagggtttagggtttatggggtgaataggggttatgtcttgatggacacacctagggtttagggtgtcggcgtagggtttagggtttatggggtgaataggggttatgtcttgatggacacacctagggtttagggtgccggcgcagggtttatggcgcatgggtggattagggtttaggtctggggggacacacatagggtttaagtgttacggcgtaagggtttagctcgcatgggtggattagggtttaggtcggggggtacacacatagggtttaagtgttacagcgtaagggtttaggtcgcatggatgggttagggtttaggtcctggggtacacacctagggtttagggtatccgtcgtagggtttaaggcgtatgtggtggttagggtgaagggcttggcgtgactggacctagggtttaggttgctgtgtaaacaagaccacttctttatgcctttgtgtctttgacaatattaactttctttcaccatttggtgatttactgggactaactacatctgtagaagtgttagtttgactagtttgggttaaagatgtatggtctacgaaattcggtttagttttacggtttagtgtgttaatgttcatttgttagggtgtgtggatatatgggatacggtttagggtgtgttgataggtgggatagggtttaggatgtgcggttatgtgggttagggtgtgtttagtgtgtagggtttgtgtttgatagttaagggtttcgggtgtttgcgtggttaagacgtttatttatgttcattgcaggaaatgagttcaagtgatgcggaggttgttcgtgttgtgctatttttcaatggaaggaaaattgaagggggaagaggtgttgtcttcgaaggggagaaaaggatgaaacgaatcaaccgaaatgcaatattgggggatttgcatcagaagatacgtccaaaattgggtgtggatggaaacacttgtatcacattgctgacggcaagaatatagcagcaagatcaatacatggggtttccaatacaggatgatgaagaattggaaatggtcatcgaagaattttttaatcaggcacggaagaattttttagagttgtatgtggattacaccgtagtacaggaagctgttttacctaggaggtcagttgcttgtaattctgcatatattgcaccatcatatcatgttgtaggtggaaacatgtctcaggaagattcacatgacccaacttgggttatggatgacgatgaagatgatgatgatgatgagaatatagcgatggaagatcgtcttcttcaggagaatgccagtgcgtcagataatgatgaagatggtggtgtgaatgcgaatgcattccagcaagacactgatgtggggtcgtctgaaatgcggtaccgtgcgggtgttggaccgacacaatcagaacaacctgttaacggtaagttacatgacataaaccctaagtgatttcgtataattgttgttcatgtatatattttgcaaacccatgcttattcatgtgtcttgtatttttaggcggcgcggttattcctttttgggacggaaatccacactacacatatatcgattggaatcacccaagcgaagaagaatcttttggcggttcagcttcaggatcaggttcagtccaaggtccctggcaaataggggacgatttgtttgttgaacaggaattcccatccaaaaaggaggcacaaattgcagttaagcgaaacctaatgagggagcatcaagaagcagttgtggttgagagcaagcctgacaagtttgccatgaagtgtgttgctcacaaggatggttgcccttggagggttagggtgtataaaccagtatacggtgagaagtgggtggtttcaagatggggtggaaaacacaattgcctcaacgaccgtatatcacaggatcatagacaacttgatgtttgatatcatttcttcacttgtagcaggtatgaactcagaatttgtgctttttttgaaaaatattaaattgtgttaaggtttgttgttaatgtgtatgttacaatgtcattttcaggaatggttaaggaggaaccgggcgtgtcaattgcattggttcaggagaggatcaccaacagcttcggatttaaagtttcctattgtaaggcatggtatgcgaagcagagagcgatggcaataatttatggagattgggaagaatcttatgcatttttgccgaggtggtgcagctacatgcttcgattttcaccaggttctttttttgatattcaaaccaatgattattttgtggcacatcgactggtccgagggaagcgtgtgtttcagagaatgttttggacttttagacagtgttgtgaggcttttaaattttgcaaacccatcattcaaattgatgggactcacttatatggcaagtataaaggaaaattgctgatcgccacgagtcaggatgggaataatgaatgcctgccattggcatttgccattgttgaggggaagacgttggaagcttgggaatatttccttgctaacattcgtttccacgtaatccaaatgcaaaatatatgcctcatttcagatcgacaccgtagcattatatctgcagtgcagaaccatgccggttggcaaccgccttttgcgcatcacgttttctgccttcgtcatattgccagtaatttcaatcaaagattcaagagtgcaagattgaagaagagcctcatgactttgggtatgttcacaattatttgtaatttagttagattaaaaaatgtcttacccacctaacgttaatggtattataattgtgcaggttatactccctgtatggccgaatttgacatagcgtatgaacgattccgcgataccagtcctgaggttgcagaatggattgacagcattcctaaggaaaagtggactcgtgcatatgatgtcgaggggagaagatatggccatatgacaacaaatttgtctgaatcagtcaacaaggtgttgaagggagcaaggaacatgcctattactgctttggtgaagcacacatacagtcgattggttgaatactttgtgagaaggggtcagacggccactgcacagctgcagcaatcacaacgacattgtaaaaatgttgttgatgctatgaggcataatcagaacgttgatacagggcacaatgtacgcacctataaccttgagcaaacgtcgtttgaggtggctgatggctgggacaggtcatattcagttaacctaactgatcgtttttgtcagtgtgggaagtttaaggccttcaaatacccttgtagccatgccgcagctgctgctttatacatccgtcagaatcctttgcaatatgtggatgatgtcttcctcgtaaccaacttggttgaggcttattcattaccttggcagcctattggtaatgaacttgccattccccccagtgaagatctagttctcatccctgacagggcaatgttacgtgcgaagggtcgtccaaggtccaccagaatccgtaatgagatggacaaagtcgaaacaactcagagagctcgtagatgcggtctgtgcaagcaagttggacatactcgtacaggttgtcctactcggggtggtgtttcatgattttgttgttatgtttgttttataactggttcgttaaatgtatttgatttataacaaatgttgtgtaacatatatgacgataatgttttggttgtggtgcacatgaatttccatttgttacaaattatttatttatcatgatttatgttacccgtacaccgttaattgaatacacctaactgaagacgcgtatcaagggcgtgattgaacacgcccaacgaggacgtctttgaacacgtgtaaatacagcgtaaaccctaatcctacaccgaattacgtaaccctaatcactagcccagaccctaatccctaatctcaccgtaaaccctaaaactaaaccggaatatacacctaactgaagacgcctaacaagggtgtgattgaacacgcccaacaaggacgtctttgaacacgcgtaaatacggcgtaactaaacacgcctaagaaatatttaggcgtgactagacacgcccaacttgggcgcgattacccctatataaggtacacggtcggacacaacatgtgtcgccccgtaaatttcattttgcataccatggcattcttaggagaaacaagcagccaaagcattggtaactccaaattagcattcatttatccaaatggatctacgaagcacaacgacacgggtgtttgttttcagggtgccactccaatagcgatgcgagttcctaatgagtgttcgtttcagacgcttaagagtaggattcaccacacccttctactaaccgatgaccatttcgtggataacatctactacgacaaccatccctagacgcaggtcagcactatttttttcattctatcacactaacaaacgatgatgatgtctgcagaatgttaaggtgtcacgaccaaatgtccactgctggtcctatagaaatattatgcaccataaacagaacagccgatgggataatcaacctacttcaatccacaatcgttccaacgcatgatgcaatgttatattacaacggaaagtggaacataccccgaagagccggttgtgtgggttatgcctttactggaagaaacccaatctgatttgaaattccttctgcatgcaccatttcaacactgaaggccgtcatcaagcaagttgcgcctgttggggttccccctaatggaattcacatgtcacaggtggtaagaaaaatgttttttcgtcatccagcacatgcacaatactcagacaccacaatccagtatgacataaaggagttggtaagcgatgaagacgtgttgaggatgctagtggaatccaactactggaaacgtctttgtccaattgaaattttagccatttttaccgaaccacaaatcgatatggaataagacatgtacgccgaagatgttgttttcaaattatccttataattaaaaatgcattttcccctttctattttttattgtaatcgtgtctgttatgaattcatggttttgacgataatgttattgttagggtttgcggggttaacgtgatcaaataatagttagaccgagcatggtaaacataaatgtcacaaataaccgtagtttacaaaatacaatccattacaatacgacaaaaaaatataaaacagtaactgcgaataaattagagtgagggcggtggccacggcaaatgacgtgcctgccgatcaggttgtactcgtctttgtggtcgccgagaactgcctgactgggacgggcctggctgtgaagggcctgcttgataagggtccggctgggacgggcctgcataagaagggcctacctgataagggtctggctgggacgggcctgcataagaagggcctgcctcatacggatgcacatgaggagatcgacatgccgtgccctgctctgcatacaccggcataggacactcataagcttcggtgacagatggtgaatgtggttgctaagcggcacaggcttctgcactataatccatgttgaaaagaatgtcatcgacctgtgcctcactccactcgacctccatgttcatttgaacaccgaacccgccatctacatctgcacatgtcattgcagtggtaacatatgcggcatgggtctgcgatgggcctggtgtaggcatttgggcttcggtactgaaatcggcgtagtccatgcccccatgccccccctgcgctgtagcctcgtaatatacgggttgtgtcccatatgtcgatgcaataacaggaggcctatagtaaccctcggtgcacggcctcggtcaaacaatgggctcaagaacctgctgcactggtctccgccgacggtctagcccacgaccctctttccttcgtcggccaactgcaactgaaatctctggatcgggctgaagctgggatttgggagcatgtgagcctgcttcctccacgcgacagctctcggcaaagacagacattaaccgacctacctccttactcgcccaatcgaagtcgaaggcctccctattgggggtacttgtcgcgaagtacaaagcctccagcccatcgacctacaattttaaatatatacacataagtgtcaagtatgtcatgtagcataattaatttaaatagacaaatgaggatgtgaagaaaacttacaccacgatcggtcttcgcgcccttctttgtgatgaaccgcttcccgtgttctctgtaccaaaccatgtactcatggtgtggtgacagcaacccctgaatcaaggggggaaggtcaatgtactggtccctagcaccccatcgtgaaataaatggtctgagtttacgaacccagttgtcttctcgtttcccccgaagcgaaaggtcatgcacacccttcagcttcctgggagcgcgtgggattggctgatccctcccgaattgccgcatgcatctatccgactgggaatattctactgtgtgaaagcatatgataggcgtagttgccatccacagtagtcgctcatgctcagaagcaccaagaaagtcgtagtccccgtatggttgccaaacgacctgcacagaacaaaataacactttattagatcacagcatgttccacagatgcaaacgtacagttcttgaaaaactactatatgtacctcgtttcgagtaagggagttcaatgccatcctatacacgaccagttcatgcggtttaaatcgacctaaagcgttaaacctaatttcaaaataagcaatgttagtatactataacacgtcattgttacaattgtaaacaagaacaacatataatcacacataccgatgtccaaaatgccagtccgactgtgtaggcagcagaatagctggagtaattggtgggaatctcagccacgcccacacctgaagaagcatatgacacccaccgatgtcactcctgcctggatctgtacactcacacatttgtctaaacaaatgtgaaaggacagctgagccccagctatatcggccgatgtccacaaaatcccctgcaagcaacgacatgtatcgtgctgcaatcatgctacctccagatcggtcgcacaggacccatgatccgataagtcgtgcaatgtgggccttcgtgaaccgcgtcacgtgaacaggttcgggaaccacctcaccccaatgcgcaaaatgtctatcaaagaaagacgggcgcaaatatccacctttcagctcggtgtcctcctcaggttcgtgaccaaacacctcctcaatgacggtcgcccactcgtcaaccgtcactccagtaaccacattgccctccgtgggcaatcccagaataccagccacgtcttccaacgtgatggtcatctcaccctgcggcatgtggaaggtgtgagtctctgacctccatcgttcaaccagagcactaataagcacagcatccatctgaaatacataaaaattattaaacaacttcatttatcaaattaaccagtcttaactcatttcataattgcgtggttgcatacctggatatgtcgcatgcgtgcaacatgaagaaacccagcttcgcgcaacatgtcagaaacaacatcgggtatgtcgtccgcatctggtccaccgctcactttaccacgtcgagtcttcaatacccgaggtggcacgcccccgttccacacaacttgtgaaacgtgcgtgcgctgaatacgcctacgcagaacgccccacttgtatggggtagggacaacataggcagtaggatccatgggctcaccctcatgatcggatgcagatcgtgatgaagatgtggaggacgaatcagccatctaatcagtatcttcatgtacaaaaatttaaaaccacggtaaacaaaatattaacgattagcaaatcgttccaacaaaattttcttatatagcaaatacattaaaccaaatacactaacacaacataagcccgaaagcttagccgatatccataaaccctaagtaaaaaaacataagccctaaaccataatcacaacataagccctcagacaaaaccgtaatccaacacaaagctttaaacaccccagacctcaggttgattctatccgtcatcatcacaggcattttcccatcctataatccaataattgttcctaaacagacaactattcctacttgttccaataattgttcttctatctgatctgtgctcatgttcttctttggttattatttgtctgtgtgtttttgtttcacctgaccctgaactatagtgcccacgttttcattttttagggtttacagtttagggtttcggattttgggttttgggcattggatttagggttgcggatttagggtttagggtttagggtttagtgtatagggtttatggtttagggtttagggtttattgtttaggatttagggtttatgctttagggtttactgggctaccctaaatcctaaatcttaaatcctaaaccctacaccctaaatcgtaaacccaaaaccccaccctggaactcggcgtagtgactagtgagcaatgtggtggtggcacggtgggcacttagcagcacagtgggcaagagagtaaggggtcgagttcgagggtttaggcgcatgggcaagggagaaaggagtaaggaagtaaggtagcaaagtgatgaccaccaagacacgaatgcttggcttggatcgtttccggattgtaatcttcaagactccatgaattagggcttgaaattcaaatagaaaaatggagaagattaaggaatgatttagaatgacgccacgatccccaatcggaacgataagtcggaggaggattcgccacaaaggaaagctcccttgataagaatcaatttggtctcaatcaagaaccaacaagaggctaagctctcaatttaagcaaaagctcaatttcattaatcaaagttaaccaaaaatagcaaagtctgagtatttatagggctagacctctaataaacccctaaaaacgttggtgcaggcctatttacggaaatataaaagcccaatacatgaaaacatcaaaaaggacgctgcagtaccatttttagtgaaaataatcgattaaaacgaagcgtaatcgattaaaacagagcgttctgcactgtgtaatcgattacagcaacatcgtaatcgattacaacagacagataatcgattacagcagcgaaataatcgattaaaacagacagacagacagacagaaaaacagacagacagacagacagcatttgtattttaatcgattacagacatatttaatcgattaaaacagacagcaaatgcttattacaacagaaaagactcttttgatgtgttttcattgaatttggtgtgcctcttcatgcttgtccacaagatataaggcatttttgatgtggtcttgaagggcttgagttctagctcttgtcatgggtccttcaaagctcaccaaaggaagtgtttcaagctctccttctagacctttggcttgtaatggacctccatcatcatgatccttagatagtcctctatcacaaagtcagagctagatggtcgtttaggcgcagacttatattcgtcaaagaaagtttccaccaatacatcgtccgttaaaacatcgtcagttggacacctagaagatagagactcatatttgtcatttcaaaaggaagtgtttgccaaggcaaaacttgaattggaaaactaattactcaatattagtgaagtgtatgtaacacttcactaataaaccctagaccctaatccataaaccctaagtctgtaaccgacgacctagaccctaatcacaacatcagacctaaaccctaaactgaattccacaaacccaagccctaaaccctcatcacaacatcaaccctaaacctaaatcagaacccatacaccctaggtctgtaacccaagacataaatcctaatcagaacatcagaactaaaccctaaatccaaggtctgttcccagcgccataaaccttaatcacaatgtcaaccctaacctaaactgaaatccatcaaccctacgtctgtacctgaagacctaaaccctaatcatcacattacacctaaaccctaacccggcacacacaaaccctaactctgtaccccaacccataaaccctactcaccttgtcaatcataaaccctaaacccgattttgccaacaccataatcactacctcagggcctaaaccctaatcacaacataagccctggaccctcaaccgatacccatataccctcaatctgtacccacaatccattaaccttacacatacgtcactaccccaggccctcaaccctaatcacagcataagccctaaaccctgaacctacatatgtcccccaggccataaaccctaataacaaagtaaaccctaatcctaaaccaaattacgttaccctaatcactatcccacaccctaaaccctaatcacatcgtaaaccctaaaactaaactggaatacctaaaaccctactcactaacctaatatatatgtcgctaacaagttcatatgatcctaacaatttactaatttaaaaatataacaaactaaatactacacacaatcagttaaatcgacttacatgtcagcagcgcttcaaattcgacagggcttcgcttcagtgaagtgtatgtaacactctttaggttattcactgtcataaaccctaaatcaggatccataacccctaagtctgtaaccgacgatcgaaaccctaatcacaacgtgctgtaatcatcttcgtcctttcaaaaggaagtgtttgccaaggcaaaacttgaattggaaaactaattactcaatattagtgaagtgtatgtaacactcattaggttattcactgccataaaccctaaatcgggatccataatccctaagtctgtaaccgacgacctaaaccctactcacaacgtcaggcctaaaccctaccccagattcaataaaccccaagggtgtaacccaagccctaaaccctcatcacaccatcaaccctaaacctaaaccgcaatccatacaccctaggtctgtaacccaagacctaaatcataatcacaacatcagaactaaaccctaaacccttggtctgttcccagggctataaaccctaatcacaatgtaaacccgtaaccgaacccgatatccataaaccccacgtctataacagaagacctacaccctataacagaagacctaaaccctaataacagcatacgacctacaccctaaaccagcacccacaaaccctaactctgtaccctaagtcataaaccctaatcaccatgtacaccctaaaccctaaacctgatttacgtacaccctaatgaccaccccaggacccaaaccctaatcacaacataagccctacaccctaaaccggcacccataaaccctaagtctatacccacaagccataaatcctaatcacactgtcaaccctaaacgtacaccgcattacgtacacactaatcactacctcaggccctcaaccctaatcacaatccataagccctaaaccctgaacctatgtatgtaccccaagccataaaccctaataacaatgtaaaccctaatcctacaccgaattatgtaaccctaatcactagcccagaccctaacccctaatcacaccgtaaaccctaaaactataccggaatacctaaaaccctactcactaacataatatctatgtcgctaacaagttcatatgatcctaacaattttctaatttaaaaatataacaaactaaatactatgcacaatcagttaaatcaacttacttgtcggcagcgcttcgaattcggcagggcttcgcttcagaggaaatcaacacctactttctagagagaaggcagagctatttctagagagaatgcgcgaatcctcaactgtcattttcaaggggcatatataggcacatggagcattaacacgcctagacagggcgtgtttggtgaccccaaatgcctaatttttgccccagttgcacctttttgctaaataaataattaatttatattatttattaatttttgcctttctcttacaattaaaaatcattacaaattatacgtctaagttaccaaatattagtcaatagaaactagctagaaaggtattttacaaatttaaaagactaaaaagtataaattttaatttgaaacattaaaaagataaagtctaaatttatgggactaaatacatatatattagcccatgtgagacttaatctaagttctgttggactgatattatccctttcatatgtaacttgcttagatgggagtctacttctttgtgctataggtttgggttatcccttatacccaaatataatataatatcttttttctataaaatcaaaataaaaaggtgcttctttttagtactggcataggacttataaaatgtgcatgataaacttgaaatttttaaaaatattttacagaaaacctgctccaatcttctctgctggaaaatacctgcacttcctatatgtttatccatccccaccagcaaatccaaattatctaacaacattgacttgtcaaaaaatcttttcaatattttattcgaaacacatactagatagaaccaggtctaaagttctttcgcatatcatcgacaataaaatatttattgttttcttttaacatttagttaagcttttcccaattaagaactgtaggccacttccaaattaagtaatgtctgccttttttggattcgtaaatatcttatcacattgtttttttgggcgttgattataatttaaaaaaattatatttattaaaaattaattaattttgttaaattatgttatttttaattaaaataaatattttttaaaattattttttattattaaaatttgataccaaatataaaaaaattattcttattaaatgaaagatatttttaaaaaatctcattaaataagatatagataattaaaatttatttatatttgagatcaaaataaaaaaaaaaattgttacttatattcaagatagaaggtgtttaaaaaaaatcaagataaaaggaagtatttacttacaaataatatatgttttattttcggatctgtaaatgtgactgtatttgtttacaattcacatgcatgttgtacttcaatctttctccatttgtcttcgtacggttcctttgtgtaattcgtttgttcacatcaaagaaaagttatttgttcacaaaagaacaaaacacatgtaattaaggaaagaattttggaaattattttttaactaaaggggagtccacgctgtcccttttcttttccaagtcaatggtagtcaaagatgtctgctgtgctttcttgtaccggaaatagatacaacatgtttaaattaaagtttaattattaatgtaatctcattaaaaaaatattaatgtaatctctttatttatttaaatagtaaaatatttaattagattcttttattttttgaaaattctaataaggtcttttatttttatttttaaatatctaatcgaatgtgtgtctctcgcatatcgtgtcgtccattgtgtgaccatagtcatacaaataagtacccatatttatactacttatcgaagagaaatgtgaacctcgtaataatgtggttagcacttgtttttttgttccaatatgttgtgtttcgttggtattaaattggcattttgctcgttctacaattcattttagtcttggaatgagaaaagtttgtgacacattattattgacgatgttagaacttgcatgtaactaaaaacaagtgtcacatacgaggttgtctaacttacaccccgttgaacacatcacggacacaagtttggagagaagtcgccttgatagatatgaagaaggtgaaccaaccccggccattgtttaagaaggtcgaactcgatcattcccatttttgcaaatttcataacgggccaggccacaccactgatcaatgttggaacttgcatgtaactaaaaacaagtgtcacatacgaggttgtctaacttacaccccgttgaacacatcacggacacaagtttggagagaagtcgccttgatagatatgaagaaggtgaaccaaccccggccattgtttaagaaggtcaaactcgatcattcccatttttgcaaatttcataacgggccaggccacaccactgatcaatgttgggacttacgggatgccatagaaaaatttatccgagagggtaaactgaggcaatacgtaattaaaacacaaggccagtgaagcaagcggaaagtcagtcagaatgaggcccaaccacaaaagagccaagatgataaaagaaacaagcgtgatgatgacgagttcccagaaccagaatttgagtgcaatatgatctttggagccatgggaggaggaggagatacggctagtcagcgaaggaaatatcttaaagaggtactttccgtgagggagcaacccaaatttaaaggaggtagcagcaaaattgagctccctttactttattttgcggaagaagacataaaggacatggttcccggtcatgaagatggcctagtaattaccggcacactagtcaattgccgggttaggagaatattcgtagacaatggcagctcagcagacattatctcttggaatgccttcaagaagatgaatctggacgaagaggacttgaagccatgtaaaactgtgctaataggtttcaacggcgataataccggtctcaaaggctccattgaactccgactcacgttaggaacaaaggaagccttcaagtcagaaagagtcacgttcgtcgtagccgacttctcctcaccatacaacgtcatccttgggagaccgaccatccacaaatgggatatgctagtgtccactaaacaccagaaactgaaaatgttaggaagtaacggcaaagtaataaccattcgcgaagaccaaaaagaatcccgccaatgttactacaatgccatgaaagaaagcgaaggcagtccatcttcaccaccctggatacgtcaaggagaccgggttgaacaaaaaattgataaatgtcggcctaggaagccgataaatctggtggaactcgatatgagagaagatattgaagaatggaggccagagtcagccaacgagcttgaggatattcaaataggaacccagccgttgcaagtcaccaagataggcaaaatagccgatccaactatcaaggccgagttaacgaagtgtctcaaaaataatcaagatgttttcgcatggaaagcctctgaaattccgggaataaagccaaccttctgctgtcacaagctgtcgatgtatcccgattcaaaaccagtggcccagaaacaaagaaacatcggcccagaatgaaagcaagcattagagaagcatatcaaagaactgttggaggccggcttcatacgagaaatctagtacaccacatgattgtctaatgtggtgatggttaagaaatccaacggcaaatggcgagtatgtgttgactataccgacctgaataaggtatgtcctaaagattcatattcaatgtcaagtatcgatcagctagtagataatttgtccggcttcaaaatattatcatttatggatgccctattccaggtacaatcaaattgctatgtacccgggcaattaagagaaaacaacatttaaaggaggcgaagaaactattgctataacgtaatgccttttagtctgaagaacgccggatgatgaataaagtctttgcccaacaactcgtccgcaacatagaagtatacatagacgacatgatagcgaaaacaaacgctaccggaaatcatattcatgacctggaggagacattccgcagattaagggagcataacatccgttcgaacccgctcaaatatgcgttcggggtaacgaccgaaaaattcctagggttcatgttgacccataggggaatagaagccaacccggacaagtgcaaagttgtgttgaacatgcagttcttagccaataaaaaggaagtccagcaactaacaggaaggatagatgcgctgacgcgttttcttccaaaatcagcggaaaaagcactttctttctttaaactttagaaaaaggaagccagcattggatggaacctggaatgcaaggcagccttccaagaaatcaagaagtgtttagcctcccctccaatgctatcgaagccggagcccggtgaaacactgatcctatacttatcaatgagcgaagaggtggtcagcattgcattagtcagagaaatcaataaatctcaatcgccggtgtactttgtaagccgagctctcagaaactcggaactgcgatatcaaaagctggagaaagtagcatttacacttttcgtaaccgccaaaagactctgcccatacttccaaggccacaccatagtggtccgaaccaatcaaccaatccggcaaatcttacataagccggatttagctggcagaatgatgagttggactattcaattatccgagttcgatataaaatacgaagcccggcacgccatcaaatctcaagctctggacgactttgtggtggagttaaccctggcgatcggaggtggcatggaagtctggaaattatatgtcgatggctcatccaacacaaaagaaagtggagccgggatcataatcgaaagtccagaaggagtatccatcgaacagtccttgcagctcaacttcccgacgtcaaacaaccaggctgaatacaaagcgttgattgtaacgccccataaaacaccagggtcattaccaaacattaatcaacaatcacacatataatcatcagaatttaagcagtttggaagcataaactaagagtgacatcatcaaatgtcatcaatgtaaccactgtacactataatatggtgaatatacacaaaatctctgtttaggtacaaaactatacatatatctcccctcagggtacaacaaaaccaaaccaaaggcaaaacacaaaacatcagagccacatgctcatgtcatctatgcctaaggtttacaagtaacaactatccctgcataggcttcttgccttgggatctatctgctcctcctgaggaatcacctgcaaaacataaagccccacacaaggggtgagatataaaatcccagtaaactcagggcccttgaaggtatttccttcccctggttcactttcagacatatacatataaatagtatatttcaaccattcataatcagattcaatatcagaacatttttcaatcattcatcatgcaaggcagggatctcattccccttcattaaacatcatttcacctcaacctgtcaatactcaggtgatatacattacttactcggtagaggctacatctatgtatataggaacatctccacttaggaggctacctctatatactaggaacatctcatgcctgaatctcaacatatctaacggaggcttcctctgtatatataggaacatctcaatcaagaggctacatctatataacaggcacatctccatctaatgaggctacatctgtgtatataggaacatctctactcaagaggctacatctatatatcacaggcacatctcataatctatatcaacacaattacccgaggaggctacctctgtgtatataggaacatctccattcgggaggctacatctatatcacaggaacatctcacagcaggtcttactcagtctcatgtcatctatcctactaccataggattcaattcattcacagaattcacattcaactctatgagtcagccatgcatatcataggttatacagtccatagtcatacacatcaatcacccatcacagggttcagatatcatttccatcatatcatatcatcatacattaattccccctcacggggtacaaagtacacatcagaaatcaatcacatcaacatacaatttccatatacatgcctttgctcatatcagaaccatcctccatctggagcatggtggaacacagtaaggacatacatacaagaaccaagagcttacctgctctaggcaaaacaccggctctcccggcctcgtggtcaccaccactagaactatcgagctcacgtcctatataagaacaaacatataacttatcaaatacggttccaagccgttagaacgaaaggaaactataatcctttctgcataacacacactcaatcacttcacaagtgattctcagaccctcaaaaggatcctactcagcctaaccaaggctacagagcctctcccaagactctgctcaggctaacataaggtacatccttgctttagccgtctcaatttcaagcttcccaatacaaccaattcaattcataaacaacatctataccatctcttgagcaactttatcaactgctctaaggttcacaataaccaaataaccagttttttctctactcatacataaactcagagccaaaatcaaacttcatcaataatgatgactcaaggctctaacttcctcagaacaaccctctgaacacatttctctacagggtccaagcctaataacagctctaacacctccaaaaacacctctcaaggtacccccaaaaccaacaaaatccaatacacaaaaccaacggctagagcttgagtttcttacctctagagggtcaaggaagaccagggaatcactttccccaagctagatcgcccacgcaaggcttccttcgcccttgggtttcaagctctcaagggttccctcagagaaattcaatctcgccgattatcgcctttcgtcgagaataaagctgggtctctagcttatctcgaggctctgaacactttctcagttgggtcagaggtgtttagatgagaaatggagaagatatggaggttctttggttaacaatggctgctctctctctccctctcttttctttctcattttcgtccagcacaagctattataaggctgacccgaaagtcccgcacggatcgcgccatgtcccgtgcagatcgcgccacagattcgaaatcactgccctgactcgtgcctctcacgcggttagcgtcatatccacgcggatcgcgccatcctttcgaacctcccacgcggttagcaccggaaccacgctgatcgcgcgagatggccaaaagcattgccctgattcaagcctcccgcgtggatcgcgccagaccccacgcgggtcgtgccacatgttcgaatctgtttctcacttctcttaagcttcctttttagggactctaatgcatggttatgttttcctaatcactaggcttaatcccatgcttaaaaattcaaggtattacattgatagtcgacctgatacagaccaaggaacaaggagcgcagaaggtaaatgtgtttaccgactcccagctcgtcacaacacagattgaagagagatatcaagcgaaaggacctttactggtcaaatatctgagcaaggtcaaagagataattgccaagttcgacgaagtcgttgttgcccatattcctagagaagaaaatgctcgagccgacatattgtccaaactggcaagtacaaagggcacgggcaaccacagaacggtcattcagcaggagatctcccaaccaacttgcgtattggtgatctcggcagccgaggactggaggaggtccataatcaactttttagagcaaggaacaataccagatatagtatggaagccaagaaattagtccaagatgcggccatgtataccgtacacgacgacgagctatatcgcaggggcctacacaccccaatgctgctatgtgtgggctcggaccaaaccgaatatgtgatggctgagatacacgaaggcatcaatggtcaacacatgggagcaaaagccctagaaatgaaagccctccgggctggatactactggccaacaatgaaggcagacgcctcagatcatgtaaaaagattcgacaattgtcagaagcatgccaagatcgtatggtcccctcccgccgagctgacgtcgatcactacaccttggcctttctataagtggggaatggatcttctaggaccatttaaggccacagaaggacagatgaaatggctaatcatagtcgttgattactttatgaaatggatcgaagtcaagcccttagcaaccatcacctcggccctagttcaaaaattctttgaaaggagcataatatcaaggtttgggatcccggatgaggtcgttacaaataatggaactcagtttaccgataaacagtttcaggatatgatggttggattccacatcaaacaccacttctcatctgtggaacatccacaatccaatgggcaagtcaaagctgctaataaaatcattctggacgggctgaagaaacgaatgcacgaggccggctcaagttgggtggagcagttgtattatgtcttgtagggacacagaactacaacccagacatctactcaagagaccccgttcaggatgacatacggctgtgaagctatgatacctgtggaagtcggacaaccttcatggagaagaaagcatgcactccacgaaggagaggacaacaataatgaaacattggccaccgagttagagctgatagaggaggtccgcgctacggcacaccttcgagatctaactatgaaacagctgacagccaaaaagttcaacaaaaaggtaaaactaaggtgtttcgagaaaggcaacctagttctgtgcagagccgatatcaggaacagaaacgcccgggatggaaagctagcagccaactgggaagggacatactaggtcgcacagaacctcggacagggggcataaattttggagactcttgataaaaaagtgatcaagcgcacttggaacgaggacaagttgaagatatattacagctactagttcacagctgcaagttcaattactagttattattcctaataggcactcagtttttcatttaagtttttcaatattgtttatgattcatgtgtttcttcttaattgagaggatgagccggggttgactagttcagcacccgtgccccataccaatctatttcattgagatcatgaatttgtggttactcccaaagcttatcaataaattttctcgttcctataaggaaattataagtgttgtgcacagcacgtgatatctaccatcctaaacaatgctaaacgtgtaatcaaaccctgatcaggttgatgtaatcaattattgataatgattatgttacatgctaagtatttattggatataaaatcgggaaaaacttaaccgggaataaaataccgacatttaacttggacaatactatactggtcctttggagccaaacaaatatatagcaagcatgcaaacacagttacaaatggaacatatgataaagtatgattataaaaagcaaattgtacgaatatacaaataaagccgggaacaacttggcaaaaacaaatgttcagagaaattacatccataaccggcatcccggcccttcaaaccttatccacttggtcgccgccttgaggggctgaaacctcctcgtccccagcaaccagactgtcatcaacctatgccacggaatcctcttgtggagaataagggatcaccttcccatcatgaacatatgacttatagtgcaccccatctgtgtttagatcgatcccggaattcaagcatcgaacttgctccaaggcattattgaaggactcctccaccaccgatgccatcatctccctcagctcggccgcctccttctcagcacccaagagtttggactcggcctctctagcctccgactgggccccttccaaaagagtcttgacttcatttaaattctgagtcatgagggcggtctttgccaaagactgttggagagcccgcgccctgcttgcctcctcaaccgcagcttgaaggtcctgttcgagcatctcggacctgtgctgagaaactcgaagctcttcagcagcagcgacaaaactttccttgactctctgagactcgaccagggatgtgtccagctcctccttcaccttaatatgccttgattttaaagtaaccaaactctaaacaagagaagcacacctgaaggcatgaagccgcatctgatcgagcttacggaggtcgtcatcagaaagggactcgagtcagataaacgcttgggagccttgacaatgggaaaaaggtcttcgatccccttttcccagagatacccgggcgtcaatagaggagcctcagaagccggggtcgaaggagcttcacttgccgacacgccaataacaattgcactggggttggggatgcaataggggtcaaagagggcgttaagacagccagccctggatcagccgaagccaaatcaacgggcgcctcccgggcaagttctgaaaccttcctcctttttgacttgcccccatctaccattttggagaggaagcgaggaggacagccgacattagttggcctaccttgactagaagtcggggtcgaagagccaggtgccttccgggaatggggcaccagattgccggattgatcctccatgtcggcagctacaaaaggaaagaagatacaaagaatcagaacaattgcaataaatagattaccaaattcaaatgtatcacaaataggtgcccggactgacgttggtgaataagggacgcagcacgagatggaccctgaacctctctatacacatcgatccggattactaaagaggcatccgtattcgatagacccgtttcctcatattgataagaggccagagaaaattcatggtgggcacaggtccagtagagtgggagtctccactttacgacggacgatttcgggccctgaagaaagaatgcttgtttgccgggttcagcaacaacctcgaaatagttattcttaaaatttttgaaagattccgcgtatatcgggaaaagcttacgattgggacgactcctaatggaagtccttcccttcctatttgggggttctcggccagttcgaccggtatgaacagtaaaataataaaagaaaaggggaatggtacaagaaatttctaggttgacacacaaatcttcgaaggattttatgaaagcccaactattggggtggagttgcgaaggagccaagcacaagtgttccaaaagttgcatctcgaaatccaacaaaggaaaacgaacgcctagacgggtgaccacgtctttacaaaaaaagaaaaaaattgcgttcaccattcctgggacacgaacagattggttcatcggggccaggagggaaaacagagaacccttcttgattcccaatggggagcgtggcaacgctccccagactcaaaacggaggaggtattaagtacctcataagttacccggggaaatttggaaattagagaaggggatggacagttagactgagacccggccgactgagattcctctactctctcctctgatggggtatccataattacctacgacaaaataaaaagcaacaatcagtaaagaatacatggagaaacggttgcaaggtgagaatctaaatttgatgaagtgttatccgacgccggggtagtgttggacatggtcgacaccccgatcccagcatccgagtcaggagctgacacggacaccccggtcctatctggcatgtgatagagtgcttttagttaaatattttttctatccttcttagcttatttgacctctcttggacttttatttttccattctaattcagtttttgtcttaggcaagtaaagtgggcttaattgctaattgtagcgtattttcagaatttatgctcacttgacctatcttccttgtataggacctacagagctctacggaacttcgaatggagcgttctagtagtcccttgaaagataacaaaaagatctataagtttgccagaaataagccgaggctaattctgccatttggagggtcattttgggctttgaagtcataaccactgcacttgcatttttgggctgcgaatttgatttttatggttgtcaatggtaaataattagaattgatgggttttgttgatggcccattcttttcttcagacttagccattacatattagtgacattggacagactttagacacacaatttcatttaataaaaatagttttacatttctctcttttaagtttttaggatcaaaacccttgctctcattttctctcaactgttcttccttgttcttcattgttcttcattttcgttttgttgttcttccatttttgtgcaatcacttcatagggctttcactgatgatgatcatggaaggctaaatcattaattaatccaaggatccaacccaagcaagaggagaattggagttccggtgtagtatttcgaattctatttgaatgttcaccttcttcttcaatttctattctgttttcatgattatgaatgtatttaggattgaaagtggattaggttatggattcatgttctaatttcaattattattcaccgattaattggatgatatttcagttagggttgtgttttcaattaatttaggagtagaatcgattgaactgcttctattgagattgaatgaatgttcatgatagaatcaaattatgagaatgatgatgattcgaatagcttgatttggtgaattggattgatgctttctaatctgttttactttactccttaataatcttgttaatttctgcactgttctttaattttagtttgcgtgtcttgcatgttttactttgcacataccaactgttcgacaatatttccccttattattaccaatgatttgaagctagaaccatattgatcgtgtctctgagtcgacctaggttaatcctgtactacagaattagcatagttaatttgttttggagcgtttcggcgaacgcttatcagcatgggcttggggacgggaactgagttatgccgacacgcatcgagggtcttgtcggcttgtttgtcgaacacagagctcgccaagaacaagaacttgtccagacagttcaaacacggttcaaattgggtttcgaacgatggttctaatggactcggtcctaagggagaagaagatcttgtaatggttgaacctggaggggaacgtgaaggaatttcagaaggacccctagacctaaaatcaaagcctgtaagaacctttcgcgtcgaagaaattttggattgaggcttctttgaggttttagaacccctggaaggggcatgcagtaacctttttgatttctcctcttctggaagagggaggccaaagaaccgtaatgtagaactaggggggacagttctgcgtatatgcgtttcctctttaggagtaaatcccatcttaggaggccaaaatgggattcaatgtgcatggcaaacaaatgggaaaagcaaaaatagatgaagaaagacgaaacccagggacagattaagaaaggagagatgtatggaagccagaataaatcacagacgaaggaaggaggaaactcaagaacagattaaaacagaagaaatgtacgggagctagaataaatcgcaaccaaaacacctataatgaaaaacagaagcactaaagtcccaaaatgcaagcacaaaaggaaatgtaagatacctggaatgggagaaatcctagggaagtttgagcaccaaagacggagagcgaaagcgaaagccaagatcgaaaggaagcagaggagaggaaagcacaaaatgagtcaccaagagcaaatgaagaaaaaatagacctataaaaccaaaaagaaagataaccgccaaaatacgaaatgcctggagtaggtaactgacggatgtgaccagtcacgaaggggtaaaagcatccaatttacccagaaagtaggggcaaaatggagagaaattcaaaacactcatgattaaagcgtgcaaagaaatgacaaagcattaaatgatcgggagacatgtcgcatccaatacctgaacaataatgaaaaatgtttcgttttccaaagatgttagaagtcgaaaagtaggtcggctatgtcaggaaaggcattaggagataacccggcaacaaccataccacggtatcgacataaaagcgagctcaggcccagaaggacgctctagactattgataacatggaatcgagtagctttatctcgacacacactggttgtttcgaatatcgatcccaagtcagacatcccgacatggagccactgatgattatatgggacgtggaaggagcctaccaaataatacattccgggtgtccagaatgcttgacaaccgggtcggggacatctgttacggatatttgggttgggcctagttatgagagaggcccattaggactcagtcaactcactttgttggtcagcaccagtaaggagaacgtggtcataaccgttctaagtaatggatatgggagtgacttggaaacagaatgcatgagccccaactgaccaagaatctcggccaagatcgtgagaaaatctcccccaaccaactcccaggtcaatggttataaatacaaacacttccaaaaaaaacaaggtacacacagcttttactctctttattcctttcacacaatgcacacaccccatgtcaattgtggtgttcttgctctagcattatgatcttctcatctgaggtattttgcttccataaatacattcaaagagagagagagtctaatcctatatcaattatccagccatctctactggacatttctgttcatcgtgaacagaacaactccaatcacctgtgatattggaattatttattaatcctatttttactttggataagtttgacaattcaattacataattgtgaaggaacaatttagtgatacaacaacaactatattaaatattaataattacattcctattaataaacctttcaaatttattgttaactaagtttccaatcaatttctatagtatagtctaagaaatatagtgttccttctaaagtgtcaaattactatatttacgagcttttaatttcactttgttaaaaattaatacaaactagaaagatagagaataactgaataagtgaaacccaaatgaacagaaacagataataaatttctagagataccggtgaggacacgtatgcactcctttggaaacttaaaattcttgatgagctgttccttcatgttactaatatcattaatggtttcctttgagcctgaatttcctttttctgtaagaaactccacagagaaccgcacgtttattatatctgctagtgctaggcaagactgaggatgagggcattgaaggagataatgacccactcatcaaattttcatttttctttgaacttccaagatctccaagtttcaacaatttggctccaatttcttcactggaaggcataatattgcacattctttctttaaaccatgcggtcccaaagttgaattactaacattaaggcacactgaacaacggtgtaagtttgctctatgcagataaattttgcttccccatttggctgagaagtagagatagatttggacgcatagcaaccatgcatagaagtgcttgtgggatataaaacaccctttttgtaccttctgcatttagatgtagcttccatcgttgacagtgtagtttccctgtaggccagtcattaaacagagacaaatatagaatccaattctactgttggtcgaaagtctcaagatgcttgcttacttttaacaagtctaacgtaattcaatgttttttggaaaaatgattttaaaaggtctattttctatttttttaacacggtttttcagaaattattttgaaagatccattttttaaatttttttcagaaaataattcctaaaaaaatcatttacaaaattgaactttgtaaaaaaaatttctcaaaaactatcttagaagcattcatctttttttaaaaaaaaaccaatttttaagatatttgttttgacaaaaccttcttaaaaattggattttttaaaacagtctgagaactattgtaaaaaatcttgatttttcacaataataacttcaaaaaccattgaaaatcatcacaaaaattctttaaaaataattttttaataatgacaaaaaataatcttacatattaactaaaaaaacatcatatatattattttttataatttttattttagatcccaccttccaacctatatgatactgaggatggatgtgcctatttcttctcacgcattatgcataaatgttacatggtcacggaattgatgattcctatgagttcaggagcttgcagactatttaatactgcattaaatgcattgttgaattaattgaatactagttctcttctgtcttgtagtatcttcaatcaccatctgtactaaaactgccaattacggcaaattaaatgtcatgcggaaaatatagtaagcatttctctggaataatataaaagattttgaagagcctttgattaatagcttttcttatagtactatctatactcctacttcgagagtatgtggcaatgaagattttcttgttggactgttacatattttgccaaaggaattaaaaagtaaacaacgtccgttcaactgaaggtgttgctagtaaccctcaattattttttcacacgtaaaaatcttagaccatactccttagtcacgaagatttaacttaactaattaaacataatgtataagttattataatttttttatcattatatatttagttttcatagctaaaaaaatccttttccgcacatacatgattgtaagggtataagattttggggtgtaaaatattttgttttcctttaattaccaataaactaagagtatatttgtgttaccatttgcaaggatgcatccccttcacatataagcattgaaagtgcctcagattaattaaacattgcaacaatatcgatggtttttcaaatatgcactaattaatttgttacaaatttcttgtgtctggtaagggaatactcacaatcaaattatctcaggtgaaagatggacatataggaaggtttagtaaaatatctcataagttgttaaattagcatcctttattttctttataggcaaaaaagtttattaataagtatgcttaaattgagcacaagttgtgcccaattcaagattccaaccaccattgtaggacattagatatataaaaccccatgagtgccaagctatatacaagccaatgtaacacatgacaataaacacctccccaacaatttattgaacccatattcccaaataatagatagttaagtgcccaatcatgtgacagaaccgtgtattaattttctatatatacaactatttgagttgcttcaatatcttaagaccctctatgcacacccatgggttcccaatctcaatgcatactacgacgacttaattggcaaccaagttgttgtaaaccaaaagtggtggcccttcatgccactttgatgggccatgttcccgttaaataccaaccactatactgtacatgagtcaatttgtgacatcaaatagataaaaactctaggcaagagacctttcaacagattttatgtaataaagaagatatgcatgtaaccccatctaaaaccatcactattttctcctctgtgcctctagttttgtcttgattcataagtcttacaatatgattcagcatttttttttactcataagaattaagctcaagtaacataagtttatataagctattttcgataattctttttaattagaactttttctattagctaaaaaaattatttaacttcattataaataaaatttttaaattatttttaacgttttttgaatattatttaaagtaacgtttttaaaaatgttaatttctagtttttaactttttatatttcattcttcttttatccttaaaatatttattcaattttcttattatcttttttaaatcattttacattttacatatacttcaataactaattttagcaaatgcttataattttataagttaacttaaaagtttttaaataattttaacgaatagtcatgataatttatgcatattatttactgaattagatttttttaataatttagctagattaaatagagctagtctaattcaattaatgacaatgcttaaaataccggccaaattactgataataaaaataactttataattgatcaatgtatgcacacatatcttcaagtaatcaagtaatacaataattgcaaaagatatgagtgtcggaaaggttgatgaataaaatattaatatttccgagatcatcacttcgagtgccgttagcattagcttgagaatttatgttgtctatcagatacgaattttaaatatgtgtgtgtggggtgggggtcataaaaagatgcaaagggagagagctaactccaattatgagtgatacagaattttaatttctgattttttttaaatagtcatattatttttttttaaaaaaaaaaaagataaaagtgtcgatcaacttaatctttttcaaagaagaagaatattaataattattattattaataatcaattttttattcaatattaatttttcttttttcttcttacctatcaagctattttaattcaagtatttctcctgtattttgctctactcctcttccaccaaataacatctatttcactctatttttctttttttttttcttcacatattcatttcatttaccctttttattttctcaccaccaaacataggattagagatgttgtaagaatcttacatttatacccgaatttacttattaattaatttaattcattagtttactccagagatttcggtataaatcttccagaattgaaagctgatctctaaaatgcgttttttacatttagagtctttctgggaagtgaaatacggaacttgtacaattgctatatctcgagaaaatataactatatgtgaacctaagacattttgcatttgtccatctctagcctttgaaagctgtcctaatcctcttgtcaagctggactacggttccctgcggtccgaacccggtgccgcattaggttagggagcgtaacgagctcgtgtagtactcgcctctctctctaacaaaggattcaatccagtcccaatattcttgaaaagtccatgcatgctagcatggttttgactattgaccgagggcgacgcatcgacagaactgaatcacgtcaaatttaattttaagacatgtaatgtttttgacatgatacaaatattaattttcacgtttaattcacaaaaatgatgcaaaaattaaattatcacgtcaaatttaattttgagacgagtaatgttcagtgtgcttttgacatttcacgttcaattcacaaaaataatgcaaaattagattgtcatgtcaaattttattttgagacgtgtaatgttcagtgtgcttttgacatgatgaaaacattaatttccacgttcaattcacaaatatgatgcaaaaattagattgtgttgaagacagaattagaaatttataataatttatacattttattttaccaactggataataaaaaataaaaataaaagcaacatacaccgatgataagagataagaaaagtctaataatacaccgactattggtttgcaaatttttattaataatttctatttacatccacatttttgctaagtacaccactgtcatcccttttatgttttacttatccattatatcctttttccttatggaggtacatcccttggaactcctttttctcttctgaaaatgtatttccataactagaatacatttttttatcatcatttctggaataaatatatgttatcacggaaagacaattctagtagtaannnnnnnnnnnnnnnnnnnnnaaattaaaacctcctttgaatcttgttaaatatttccgaaactttgtgacaacttcttgcttggtttataactttcaagtgacgctttccttttcatttctcatcttttcaatcttttctatgtcttattttaataatcttgttattgtttacgacattgatattattatttaattgttttgggttagtttcttctcttcttcctcannnnnnnnnnnnnnnnnnnnnnnnnnnnnnnnnnnnnnnnnnnnnnnnnnnnnnnnnnnnnnnnnnnnnnnnnnnnnnnnnnnnnnnnnnnnnnnnngtctttaattcctccagctaacaatatgaccaactctaacaattcataaaaataaaaataatgacgactaaccaagatcttattacccaacacactttaaacatattgttggattcataaccttttagagttacaacgaaaaaattaattaaattatttaatataataaaatattcgtattacaaaaaattataagtaaaattataaaatattaagtactgcaactcatgaatttgttggataaaaaaaatagaccgattttctatttaaagcaggagttagtttatcactttatcctacaggatctatctaaataaaattgtctaatgttttaattcagccaaaaaaaaagttgaatgtgaaaggtgggctcaagaagcatcaaggagagaaaaatcttatccacacacatccaccacgaaggagaggatctcagtctcatcttagagacacaacataacacaaacacaacacaacacaacacaatatacaaaagcagtaaccagagaaaatggctagtgtctattctgcatgttcaggttctgctgttcttttccacagcagaaagtcctttccctcaaaagggtctttcattcacctcaaaaggcctctctctgccaactgtgtagcttctttggggactgaggtatcagtgtctccagcagtagacactttctggcagtggcttaaagaagagggtgttgtctctggcaagaccccagtgaagcctagtgtggtgccagaaggcctaggattggttgcactcaaagacatttctaggaatgaggttgtcttgcaggttcctaagaggctatggattaaccctgatgcagtggctgcttcagagattgggaaggtgtgcagtggattgaagccttggttggctgttgcattgtttctgataagagagaggtcaaggagtaattctctttggaagcattacttcagcattctgcctaaggaaactgactctactatatattggtgggtttctttttatttgcttgttagggtgtgtttggataagattatccaaaagcattttctggagaagaaaataagggagaaaaagatgaaatgagtttctccataagttaataagttaaaattaacttatgcataagttaaaagagaaactatacaagaagaaagcttctacaaattcactttttatgcataagctaattttagcttatggagaatttttttttccctagaagtatttatggagaagtttatccaaacagacccttaaacatgcttaatggggatttcggttgttttcatatggttggttgattcagttggtaattggttattccagtgcaggtcagaggatgagctctcagagctacaaggttagttactaagttgtgtccatgtttcaatgcaaaagcatgtaaataaataatgaaaagattgtgctttggagtagttgctttgcttatattgtttacttttggaaatgggtttgtagtgtggttttcgctgctgatttaactcatttatgtagggactcaacttctgaacacaactaggagtgtgaaacaatatgtggagaatgaatataggagattggaggaagaaattatactccctaacaagaagcttttcccttctcctattaaacttgatgacttcttctgggcatttggaattctaagatcaagggcattttcccgccttcgtaatgaaaatctagttgtgattccatttgctgacttcgtaagaacattttcattttctctctttatggtcactatagtgtatactgaagcagtgaaacttaactacagaagtacctccagaacaaagaatagagattaaacatgaacacatataactgtctgttactattctacttctagagaaggaaaaaggtttcagtactccaggagattgtactctttttatcagaaatcataacaccttgtatgtatggttattttttcagttttttttagagataaaaataagaaaaaactatcaatttaagaggattaactgtcaaaggagtcaatactaatagtgcaccaataccaaaaatttactcctaaagtagcattttacttgcttttgtgctgatattgtcttctccaaattcaatttctggatcagataaaccatagtgccagagtaacaacagaagatcatgcttatgaaattaaaggagcagcaggtcttttctcctgggactacctattttccctaaggagccctctttctctcaaggctggggaccaggtgaagtgttattgcctcctcttatttttctcttttcacattccatttatacacaacatacccttaaaataagtaatacatctgtccatcaaaggccttttctccaataggagcattattgtaattgtatctaagtctaaaaagcttatatatgaattagcctgcatttatctatcaaagtaaaaagtagcatgttgtgatactacacagatgccaaccagaacaacagacgagcctagtagaataggcgagaactaaaatggtgtataggctttgattgataccatgttagatctaaacttaaaaccaattaacactaagtgaagttgtccaacaaatatataaactgcaccctgagaattgaggcaggtgatgtgggacttcctaacatgcagttgttaacataaattacataaattacaatcataacatggttacacataacaatggaaggaacttttactgcaggtatatatccaatatgatttgaataaaagcaatgccgagttggctttggactacggtttcatcgaaccaaatgcagatcggaatgcatacaccttgacactgcagatatctgagtcagaccctttttttggtgacaaactagatattgctgagtccaatggttttggtgagacagcatactttgacatcttctacaaccgccctcttccaccagggttgcttccatatctgagactggtagctctagggggcactgatgcattcctgttggagtcaatatttagaaactccatctggggtcatcttgaattgcctgtgagccgcgacaatgaggagctaatatgcagagtggttagagagacctgcaaaactgcccttgctggtcatcatacaaccattgaagaggtatgcttttggttttaatttaggatgaggaaaaaaaaagcatgcacattaaaggattttcctctggtttattggtataagtatccatatgtcccatcatgaggataaaccatgataaggtttggttaatttaacacttttagaggaactatggcatcttacaatggtgtgtttggaagacaggaaagaaaagagctaggagagaaaatatgaataacaaggcattttattttgtatgactgaaagaattaaaatggaaagaaaggggatagaaaaactatcttatagaaataaaattcgagggcctgtttactttaagaaaatattttgttttttgttttttgttttttgttttttttgctttcacttttaattacaaaaatactaccttgtttcactttatttcctattttcaaaagtttgtacaagaatcattaaaaacatttttttattgtttttatgttttcattatttcctatatacacttttgaaaacaaggtaacatttttgtaatcaaaagtgaaaacaaaaaatgttttcttagtatagacttgttccaaatttttcgttctttcaatttgctcttcaattcaaattacaattttttttcactccacactttctttcctcccaatcaaatggggcctaaactgtgaaaattttgaagctgattgagctcaacaaataactgaacaaagcaagtgaatggcaggatcaaaagttgaaagaagcaaagctagattcaaggcatgctatagcagttggaattcgagaaggggagaagcagctcctgcagcaaattgatgagaccttcaaggagaaagaattggaattggaccagttagaatattatcaagaaaggaggctcaaggaccttggactttgtggggaaaatggtgatatccttggagaccttggaaaattcttctaggaagcagaagcagttgcactttttaaggacacgctttttgtctacattccaaaggacgagaaaacataaactcttgataaataacaagagcaggcttccaagacaaatccatgccatgtattcaattgatctttgaagaggatcataatcaagtttttgactcaccccattttattacaacctattagtctgtaaagaggaagatgtagtgaacttttgaatgcctaatatgaatttatggctgtgagcctgtgacatgaactattgttatataactatacataacccaaactaggaaaattaaataaataaattaaggatgaaattgaagatacatctttgcatgcctcaatagaagctgatatttctttcatcttttttttttttttgtttttcgttctattttactttcttttccatggttctctacaaattcacgtgtacatatttatgaaggtcatcatgtgtacaacacttgagcaattaagtgggaaggagcaatttataacttcctcttgtaaacttgtggtggagcagaagagtgcatttttacatgtgacagcttgtactcattgattgtatttgacttaagaggacctagccagtcatcacactttgttccctcactgaggcattcataaggattggcatagaaaaaatcctcttcctttggcttgtctgcgtcaactctacgattagttggctgtcctattcttttttcatgaacctgtctcacagcatttgcaaactcattccatggaagggttccattttgatgcatgtcaagcaattctatgagctttttccgatccaatatggtggattttttaaaaccagaatacctgcatgaggactagttagtttattttgttgtgtttaaggctggttttggccttccaatataaaattaaactgaaactagctagagggtgcatgcgcacctgcgatggcctttcacaagttttgccatgttaccatcataggtaggaacaaaggtattactggctacagaaaccataaaatctaaagcttccatttgtgatgaatgattctgaaactgctgcaactcatcattggccagcaatgcctctttcttaacctaaaagtcaaaagaattttatgagaagagcaacaaccttggtaaggaggagagagtgcataatgtagatcaggtaggtaaagaatatgaaatttctttcaaaagtatttagttgaatcatcatataatatgtgatatgaactgtaaatagacagttttgcatagtcccccaaaatccactatagcattttattatttccaagaaagtaaaaactgtgtcaactccgaagatcttaccatatttgccacggtttgcaatcctgatctcagcttaacacttttttggtaaattagtgggatcgtcaagtaaaatagtaggatcgatgggttcatgcaatcccactgtgtttcaatttgacccatttttttctcacttaaactgtaaaacccatttttaacccaattccaccaaaatcctaaatgaattttttcagctgcacctttattctagttcttgtgtgcctgtggttctgcctcatgtatcactgcatctgtctcttctctattgtcttatcttcgttctgctgttctgccttgtacatctacctcttctctctgctctcatccccttcgctttgtggatctgctgacatttttgtatttggagttgttaatttgttaccagtttgaaagtatgaccttatgtattatgatttannnnnnnnnnnnnnnnnnnnnnnnnnnnnnnnnnnnnnnnnnnnnnnnnnnnatttgaagttttttttttttttttttttgttattttgtacacatgcatatattatgaatttagtagattcttacgatatgttaaaggtgttcttgatgtggatatcatgatctgttaactgtcccatgatttacaatctttagctcccgtcctgatcctgagtaggttcattttaactaccttgattatatcatatatagaagaaccaaaatataaacagaaaggagaggggggcggggggtttgttaatggtgaactcaattcttggcagctcttagttgtgctaatctacgttcaccaccataaatttcaccagctgcaatatatatcggtgtctccctgtcaaaacccaaggcttgcagaattaaggcagactcctcctgtgtcaaaggacagagagacctgtgatctcctttcttcagacactatctccttctctctccaggaagggaatgcatacctgaattacacaagcaagatcaaaattttatgagatagatccatcttatgtcagctcgttataaataactttgatcacaggaatatttattttttacgaagtgaaggtaactactaatgtgtaattgacaaaatacggaaaacccaacatatcatgtaactcatgaactacagatccactgctctcctccaactagagggtgcctccaccagcacaagcaactagcatccaggactctgatagaacaggaggtacaattaactatttagaatcaatggcaatttagctatgatagagaaaacaattatagtgatccgcatcttccccacctatctctcataaaaacctatccataagtatatgaacagcaaaacatgaaacataaaatacctcatccgcttgagctcctcagcttcttcatcagtgcaaccatgcgtacaaactgagaaagccaacatatccatctcatatctcagatgcaatgctcacaaaaggtccaccgtgaacgaccagtccagccaacgcaagaaggagttccatcaacaagaaaaaaggaactctcttataccatcttagattctttaaaatgtgaatttgggcataactcaaccccaaagttaactaaaggggggaggattgtccctcatttatatagtctatcttaactttatctctaaccgatgtgggacttaggttttttccaatattagagccgttcaaaaaattttttttgatgatccttagatttatttagaattattaaaatgagtcaacttgattcattaagtttagtgagttaattcaacccaacccactttttggaagttaagaagtagtcaatttggtttaatccatcaataattgatactttaaacaggttggttcatctaaattttaaaaattaaattaaaaatactttattttattttattatgacaaaatattaaaaataaacatttaaatttaaaattttaaactaatgttctgccatttgtaattgtagagggtaattaccaaataattaaggatatgatatatgatatatttataatctttaattttttaagttatagtaaagtgagttttattttttaaagtaatctcaaacgcgtgagcaagtccgactcaccatggattcaacataattgaattggattgtaattgagttgaatcaacctactttttatgaggaatattatatatgcttccttttttttttaagtacactcccttttgtattttaatttggttataacttaaatgatcttctttttctaaacctcattctttccttcacactgccacatactccctcccctgcaacaatacatcacttcccaaggcaacgaaacacactctctctttcattagaatcactcatcttttccactctatttataacctctaattcaatatcttgctcatggtctttttttcttgtttggtctctttgtctaacattagggtttttgatccttcaacctctcaaacacagtacatatgtaattatattaataatctaccaaaacacataacatctttcttgcatgtcacaaaaatcatctataattggggctcctaaatgcaattaattgatggctgacatgggcatgaagaaggtgatttttgagtcagactacaagctaatggtagacaagttgaacagttttgacactgatttatctaagttagacactattattcttcaatctaaaaatttacttgtgcaaaatcctcactatacaatacagtttgctatgagggatgctaatgtcgttgatcatacttttgcaagaggagcactagctcatgctagactcagtttacattccctcttttatatttgacttgacgattaatgaaatgttatgatttagcttttgttccaaaaaaaaagttttaaaagacattttagtcttaaaagcaaaatgacaatcaaacaaacaataatctcaataaaaaagaggagcaaactcattagatataataataactaacaatcatcagattttataattatactatacatatataaatatataaatatttttatagtataatgttaataattacatatatagatatagatagataaatgaaacttataataatacacaaaacatagttagcataggtaaaataattgataaaagaaatataaaaatatcattcttatcatatctattaatagatttgataagaataacatttctatgataagattagtatataataagtggtaacatatattatatatattattaaatttattaattagtatttcttttttactagaagtagtatatatattatatattactagtggaaacacatatgatgttgtcttgtcatgcttatgtatttttatttctattttgttatcatattttcatgtgctaaaattgatatatttgtactatatatattattatgtattgacatatatgttaattttattattttctttaatttgtcttattttttttcatttatttnnnnnnnnnnnnnnnnnnnnnnnnnnnnnnnnnnnnnnnnnnnnnnnnnnnnnnnnnnnnnnnnnnnnnnnnnnnnnnnnnnnnnnnnnnnnnnnnnnnnnnnnnnnnnnnnnnnnnnnnnnnnnnnnnnnnnnnnnnnnnnnnnnnnnnnnnnnnnnnnnnnnnnnnnnnnnnnnnnnnnnnntatgtccatgtctccaatttaattgatctttgaataaatgcttttgtcggttaaatactttgctttttttatttgatctttgttggtttttgttttattttgtaagatcatttggagggcatatttttggagagataatatggaattccaacactataatgtgagaactttgaagaattttgaaagtactgagttagcttaggtgagctaattctgattcactaaagctaaatatctcagaaagttttagcatttattatgctcgttttagctagtcacatctggctaattaaaatgagctaacttgaataaatgtgattatttgttgtgtttatttaagcgagtcaattagagctagattaattgagcttatttgacaagagtccactaggcccaatttcatataaaaagcctattgaaacacaaatgagggattttatttgttaaaactagtacattaattttttcttttgaaggaaaactagtacattaataaaaagaaaaagaaaaaaaagttaataaacttcatgcaacagaatcttggtttgcttatcattcaccaaagaagaaaagaatcttggtttgcttagtcaactagccaatgaacccttgattatcgaaggccccacattagtacatttaaatcctactaagtactgttgtaactattgattttttttttctgggttgcttgggtaagaatcccaggacaaactaatttatattatcgattattttatatcttaaaactcatataatacctttttttaattttattttaataaaacaaaatgtaccaaaagtatacttactaaaaaagctacaaaattgcgacgatacaatattatcacaaaattcaaatatttaaactaagaagcaagatgggtaaaaattttgcttatgtaaaaaaaaaagtgagaaaaattgttaaaacgttttaaaataagatgaaccaaaataacttattcttgaattaataatcaaacaccaaaaaaaatacaaaaaaaaaaagttaagtttgtatttccataagtgtaaaaaaataataataaatcaacatcaacatcaacagcacctttaacccaagttaattggggtcggtggtagatgaacccaatgatagatcaaaaataaaataaagaaagagaaaggtagaggtaaagaaaaagggaaaataagacaaaagaaaagaaaaataaactacaatacaagaaaggtgaaaggaagagggaagaaatgaagaggaaaataactaaacaagggaaatgactggaatatagaaatactaataggtttaatcctccaccaagcttatagcttttctccactccgtcctaagacacaccgtccgtcaatctatgtctcattccattaggttttgtttaactatctttcccatgtaagtttcggtcgacctctacctctctttgtgtcgagctcttggtaacaaactctagttcttacgggagcatccagtgatcgtctcatgacgtgtccaaaccacctcaatctgtgctccttcatcttttcacacactggtactactgctacctttcgtcaaatatcctcatttcttatcttatccatcttcgtatagccacacatccacattaacatcctcatttctgctaatcctattttgtactcatgttgcttatgtgttggctaacattccgcttcatataacattgtcggtcttacaactattctatagaattttccttttagcttaaggggaattttgcggtcacacaaaaacccagatgcactctgtcatttcatccaccttgctctgattctatgatttacatcctcatcaatctcaccacctttttgcaaaattgatccaaagtatttgaaaacatctttcttgggtacctcttgaccaagtagatgcattgtgtcttgatcatcatctcttacccgcgaaaactctccatatactccatcttactcttacttatcatgaatcctttagactccaaagtgtttctctactattgtagtttcctattaacatcatctttggtctcatcaataagcatgatatcatctgcaaaaatcatacaccacgacacttcttgaatatctttcgttagttcattcatcgctaaggcaaagagataaggactaagagctaaacctcggtgaacacctaccgtgatagggaaataccttgatgttccattacatgctaccttgatgttccattacatgctttcacccatgtgatagccccatcatacatatccttgattgcattaacatactttaatgctacatttttctattcaaaagtccaccataagactttttttgagaccctatcgtatgttttctcaagatctatgaacaccatatgttagtctttcttcttttcccgatacctttttattaattgtcgcatcaagaaaataacttccatggtacatctttctaacataaatccaaattgatttacgaaaactttgttctccctccttaggcgatgttcaacaactctctccaaaacttcatagtatgactcatgagcttgatgcctctataattagaataattctggatatctcccttgtttttgtaaataggcataaacatacttttcctccaagcatcaaatatcttatttgtttaaagaatcttattgaaaagattggtcaaccattttattgctacatctccccaacctctccacacttcaataggaacatcatcgggtcccaaagctttattattcttcatcctctttaaagcctccttaacttcatgtgtattaattttgggcacaaatcttctattcagatcatcaaaaacgttctccaaatccacttcacttttatcgtcatccccattaaaaagtttgttaaaatagttcatccatctttcacttacatcttcatctcttttgttactcataaggaacaaaaagcttgctctttcagtgggcgtggaatgagggagggtaaaggagtgcattcatttaattgttttaaactaaaaccataaacccaaaagtaggtatcttcaaaagaaaaaagttcataagtaggtaatatttgtacaaataattttctttaatatcataaaacatattttatatatttatttaaataaaatatttttttaacttatatccacttattgttttagttaaaatacattaacaagattttaatatattccaaaaaaacaaattaatatatgttaacaaactctaaaatcataatcaaattgtaatattttttaagataatttttagttacaatttgttaaaacaatttgtttatttatttatttatatgcataaaaacaatatatgaggtaatcttattccgaaggttcaaaataaacaattcagggttggatgatatgcgtctagcatatcatgcttttcaagttaaaagaataaaggaatcaatcataatggagtgataattgcatatatatgtggaagttttgattatttcatcatcaatcatactattactcattttatgcatttttatagcaggaaagtaagaaaaccaagaaccctctgtgatctcacgctaatggcgcgagaactggtgtcgtttgtgccaaagaagtaattttgtgcacctatctgccatcttaagctaccagcgtgagaagtggcgccagtagtgccaacattcagccagagccatgccatcagtgctagagccgcgctatcagcgccagcgacacgggatttcaagatttgaattgatatggcacaaaaataaaagataagtgaggattttataacctagatataaatatagactaagggaggacggaaagggttccacagcagtcaatacagagaatacattgtagaataacaaaggggaagctaggtcaagagtgttggtgttaagattgaagggttttgcttcttcatcttctttctaactttctttatctatgtactctgaatttacacttttaaagtcaactatgaataaggttggctaaattcttctttgtagtcaaggccacaacctaatgtgaacatctttgataatggattgaatgctatgattcttttatgctaaagtattttgttttaccttgtgttgaatgaattatatatctttattgaaattgatcactttgataaagttctgagagttagggttcacaatagaaatattggggctttgatttctgaaaaaggtaaaataacaattggtacattacctagtgatagggatgtataattgtagatgaattgatgcgtctcacttaatgcttaatcgaaggggaatcactaaggaattagggtttttacttggattaaaggattaaagctactaaggaattagtctttaactagggtttatgtcacgaggcattatctgaatatttagtataattgaatgtaaccaatctattggataaggtaggatcaaacggggtgtgtgccctggctacaattctttctcattaatttctaaaacccaaacattgttctccttgaattctttttaattcttagttctttttattatttaattttcatcacatcaaatcataaacacccaatttattaattcttcttcatccaatctaaagatagtcattgcgataaaattggtgattcaatccatgtggatacgatactctacttaataaattattacttggaacgatcggtgcacttgctgaacgcgcaacaagtttttgagacatgaagatgctagcctcctccaaactcttttagttcttattgtgaaggttgaccagcctacttgtctcaaagaatttagacctatcagtctatgtaatgttgcttataatgtaattacgaatattctggtttctcaccttcgacctttcctgaatggtttgattgggccagtccagggtagctttatacgtagctttatccatgggcgtggcacaatagaaaatgcaatccttgctcaggaagctatccactttattgccaagtctaaagctaacaagggctttgaggctattaaagtggacctggaaaaagcatatgattgggttaactggtcctttatgaaattaacttttatgaactttggatttcctcttgctatttttaatcttatcatgtggggagtgcatggatcatctttgtctgttatgtggaacaaagctaagttagaacgtttcacttcgaagagaggcatttgttgggtgatctgctatcgccccatatttttgtgttgtgcatgggagactagcagtgagcattcaagaccttgtgaccaaggggttgtgggagcctgtccatatatcaagagggggcctatcgttgtctcatctcctcttcacaatgatgtgatgttattttgtagagcatctaatgagcaagctaaggtggtgattggagttcttgattagtttttagtggcttctggcctaaagattaatctggccaaagttcaattttatttgttcaaagggggtcccgaatccaattagagatgaagttactaatattttgaacattagatgtacccattgcattgtcaagtacttggggttcaagttcttttctgaaagagtgtcatctgcggattttaatggtatggtgaagaaggttcaatctaaattggaatcgtggaagggcaaattttggaataaggttggtcgcctatgccttactaattatgtattgatttctatgccaatctataacatgcaaacaatgtggctcctcaaatcagtttgcactaagattgatcaatattgtcgctcaatgatttggtcggcctagggtgcagcaagatgctagaatttggcttcttgacaattgattactcgacctaaactcttgggaggattagaagtgcgtgaagagttgcaaatgcataatgaaggtttatggaatgcttggaaccatggatatcgtcatattatttgcgagactgattgcagagaggcttttgaagccatccaactaggtgataatgaaagttgtagagcccatctacaccacgatgttgtccaggagattgtgtcgttgatgttgcaaaatcgacaagtagagttccaagtgattatgagaagtaaatggagtgtataggaaatgctatagattgcagcttgctttattgataataggataactgtttatatagatccaattacaacaaaaataagataagatgtatatcttatcatgtactagatatatcttatctaataacaactattcaaaaataaattaagatatatatcttattaggtactagatatatcttatctaacaacaactattaaaaaaaggtgtatatcttatatatagagtggctcatacacttgtgagttggggttcttcggctccactagtgacaaatttttggctcaaggcttcgattggggttttagctcttcttgatctcgattttgtttctttatagtttgtgttagtttatttcctactctaccaaaaaataaacaaacatagatccaccaaacaaaaaacaatgtggttgtatcttttattttatttattatttgtagtatcattttatttaggttaaattaaagtcttctaatttaatttttaattcaatttgatcctttagttttaaaaataatttaattgttaaactcactcaaacacacagcacgtaattgtatgaaaactgtattgatatcaaaactcaaaaaataatcagagtatattagtgtattgatagcactaactcagctaactaaaattagttatctaactaactttcaaactttgaattatttttaacactcctccttaattcaaagttgcatttacacatacaatttcaattgaatctcttaactctctaaacctttctaacttcaaggctttagtaaaaatatctgccaactgaattttagttatgcagtgctctatcttcaacttctcattgctgacttgttctcttaaaaaatgaaatcttgtttctatatgcttgctcctaccatgagatgttggatggcttgctaaatcaatggtagatttgttgtccactagcaacttcactttgcttttacatttcacttgcaattctatcatcaaggcatctagccatactgcttgacatgcagtttttgaggctgcaatgtactctgcttcacaagaagagagtaatacaacagcttccttagtggaggtccaagagactggtgctcctccaaagaagaaaatatagcctgttgtgctttttttgtcgcacttgtctttggaaatataatgaacacttatgcaaataaccaagaggggggtgaattggtttttcctcagagttttcaaaatttttcttttgaaaatgtaacagtggaagactttcaagaaggatcgtatcttttaaaacaacaaagaaaacaatttttcttcaccaatcaaatctctcttgtgttgtgtgttgcgaaaaggcaagtgtaccgttcgtttcaagtaatagagtgagtaagtagagtatcgtatccacagggattgattcctaattttatcgtaactcacgatctgagagattggaagaaaatttaaattgttttaagagaataatgtgtgttgtattttggaattaagcgaattaaataaatgacagagattaatagaaatttaaaagcaagtttgacttgattgtaatgcagttgagagaaataattgtggtcagaacacaatcccctttgatccctacctctttcacttgaattggttattaaattcaattacttctgattactcagaggatgtatcttcccaaatttagttaaatcctaattccttagcaatttaaccctttaacccaatcagaaatcctaattacttagcaattcctatcaagctaagcatttaaaagaatacatcataaaaattctgcaatcatacatccctatccctaggcaatgtaaaaactgttattttactccctattgcgaactctaaccctcaaaactttaatagaatgaccaaatctaataaagaatgatgcaatgaagaacagagtaaaacaaagtaatcataataatctcatattaataccaatcaaattatagaggagttcacattggttcttggccctaaccacaataaagaaagttagccagacatgttcatgtctaacctcaagaaatacaaagacagcagaagcattaatctgtcttcaaattctagccttgatcttctctccattgtgtttcggtgtgtaaaaagttctgtccaagggtgttttctctatcagcccagcagcctcctatttattcccccacgttctttttgaattaaggtaacaaaacctttttaccttagcaatttcgtgccaaatccttttaaatctggaaacaggataattttggcgcgactagcgcggcatctcacgctaatcgcgtgagatgttcgagttgagggttctttccagaccttctggcgctaacagcgcgggatacggcgctactcgcgtggtttgttcgagatgaacttggcttcctggatctttggcgcgacccgcgcgaactatggcgctggtagcgtgaactattcgagctgagggcttgatctttgcaagctggcgctaaccgcatggattcccacgcggatcgcgtgggctgttcgaaggttcaggcttttcctctttgcttcatttctcctctttttgctctgaattaacaacatggtaataaaaatgagataataacaattaaacaaataagatgtgttagcaacacatcactgtgaccaatattgtgatatgaacaaaattaatacttcaagaatatagtgaacataaacagaaatattaaatcacacaagatttttactggttcacctctcaaccccggaggctacatccagttttcttctaaccaaatcttggtcagagttccactataacaaatataagttctttacaagcttacaatgatctctttttacccatcctaggtaaaattcaaaatctataccctatagacttttcaaaagatctagaaccagagatcccttctctgttctaccctctaaaaacccttctagaaaaagctttaaagattacaatttgttatatgaacattcaacacatatacaacacaaatatcaacaaaataaccaagcttaaagttcaagaaagatatcacctcttaatcctcagtaaattcaatgaaatgaattatctaaccaaactgagaatgtatgcaagtactctttcttgataacttctttaaccaaaaggcttgaacaactcttcacaccatgtgaataatgactaacatatcatgcaacactccatgacacttagcatctttgattttctcttctcccttttgtctttgtgttttaagaactattgaaagtgtttttctcaaggcttgtacgaatattttacaaaatacttgttattgaaactcagtcctagctgttctatttataaaaaaacagacttaactaactataatcgattatttcgtcaaagtaatcgattattttaaccagataatcgattaaagtgttcatcagaaatctgcaattttgtcaagaacaaaataatcgattaaatcatcttgtaatcgattattccagatgacctgagttttctaatacacatgtgtaatcgattaaattcccaaataatcgattaacacagatcatgtcaaaaatacatcaatgcatatttaatcgattacgaatatctggtaatcgattaaaccagatgaaaatgctttttataaaatatgcagagactcagataatcgattatttagtgaagtaatcgattatcacagacaacgtctatcccagtgttaagcatatttaatcggttacaaatcaatggtgtaatgcctgatattttaagcatgtgattaagcctagagtaaggccatgattaaggataatgaacatgcttaagtatattcagatgaaaggcttggaaaagagggaataggcagtttctgtcatgtggcgcaacccacttggggtgccgcgcgacgcgcgccatatgtgagaatccacgcgagtcgcgtggagaagtggcgcgagtcgcgtggaaggccagaaagggtggcgcgagtcgcgtggagaagtggcgcgagatgcgtggaatcggcgaaaatgttttataaataggcctttgggttgagggagaaagggaaaagcagagagcgagagagggaacctccattgatgaacgttagagcttcatatcttctccatcgttcatctaaacacctccgacccaactgagaaaatgatcagcaccgcgagataagtgagttaccccgattgattttcgagaaaagctgagaaatagtgagatcagatttctcagagagaacccctgagagcttgagacccagaggcgaaggaggcccagattgagcgagctaccttagggaaagtgattccctggtgcttctgagcatcacagaggtaagaaactcgagctctaattgttggttctgagttttggattccggggttttggggttatcttaaggggtgtttttggaggtgttagagccgttattaggctcggactctgtagagtcttatgctcagaggactgttctgaggatgttagagccttgaatcatcattactgatgaagtttaattttggctctaagtctgcatgagcagatggaaaaggttgactatttgactagtctggaccttagagcagttgacaaagttgctcatgagatggtatagatgagtttgaccgattggaactggtgattatgagaagttgggttttaggctattgtgagcagagagatgctctatgttagcctgaccagagtcttagtggaggctctgtagccttgtataggctctgagggaggcagttgaagctgtctgatgagcttgttatattatctgtggacggtctgtgatatgtggttgtgtgccttgataggaccagacactgtgggtgtcagagacacaggccagagttcgaggctaaagctgtgagtcacggcttgtcaggtaagctcatcgctctgggggattagcccttttctcttgtttatcacccaagtaggtgaatgatgcatgccatgattgtttatatgtatatagatataaaaatgtgcatgcggagatgtgagaggccagtgtggccgtgaattgataagaataggttatgaagggcttaagtggcctatttcaatgattatgtgtattgtgagccttaaaggctagatgaacggcactgggagtaatactcaagccgtgtcagacatgtatgatgaatcttaggatagacaccgagatggtgtgaggttttgtgacacctgtggcttcaggtgtagggccttgggccgtggactgatgaacacgatatgagtgttctgtgatgatatgtagatcagagaaggatctgtgatggaacctacaggatactggactggtatcgggctagttgaggttccctagccagaggaagagtttgaggactccctggaatagctgagattccatgggaggtgccactgctctccgtgaaagacctaaggacggatgatttccttaggcagagatgattgaagtcctgagtgagtgagtcctcaggcattgttgtaaagtcctgagatgaataatgcctcaggcatggtatgtgtagtcctgagggagagattccccaggcgtttctgagtaagacctgatgtggagatgttcttatatccacagatgtacctccacaggcaatggtatgagataagagaagttcctaggagatagagtgcctcctttgtgagatgatctctcctagatagtgggaagtcctgaaagatagagtgcctcctttgtgagatgatctctttcaggcagtggtttgagccctgagggatggagtgcctcctttgtgagatgatctctctcaggaagtagagctgtaagacctggaagattgagtgcctcctgtgtgagatgatctctttcaggcatgtgattatgtcagtatatgagatgtatccgttatataggagtcctccatacgtggttgtacctatatattcggatgagcctcctttcagagatgtaccggtacataggagtcctccatacgtggttgtacctatatattcggatggcctctgatacgtcctgccatgagatgttctagtatatatatctagatgagagcctccgcaggatgatgatagatagtgacgtcctgccatgagatgtcctagtatatattggatcctctgtgagttggatcggcatatatatctaggtaagagcctccgcaggatgaggataggtgatagatggtgatgaccatcggaatcacatggaaaatgatatgtgatgaatggcggtatgccatgcgagtaacctgattgtagtcaggtagatgcacggtgatggtgcatgagtttggggaggtaatgcctctctagtaggagcagtgttcagttgtgaacacttatgtaatatagtacctctgtgagacaggctctgagagcttatatgagatgctggtgccatggttatggctttaattttggtgagatgtatgaaagagccagtatagtatatgtatgccatgatgatggcgtggctctatgagatgagtgagatggcctgaaagccagtttgaggtgtgagacctctgatagtaatagcattcagttgagtaccccgagagctgggatatgtgttaaagctaggctaaggtcctaggttttagtatgtatgagctagggtgatatcctaagctctgatatttgtatgtgtattatgcttggggataaaccagggtaagggaggatatcccagaaccctgagcttactgagatgtttatctcacccctattgtgggttgtggttttcaggtgcttcctgaggagaggagccaccgcatgacatgaagggtagctgtgagtgctggagatggtcatgggctgcagctgaagattggaagaattttatttatacctctgtcttgttcttgtatctgttttaagatggggtgtgagtgtacacccgttgtatgtacagatatacggtgtatataagtttatgatactcctgattacctctgtatagatgttatatatctgcctatgttttttttatgttgagtatatggatcagcaggggatttatgttgatgttgtgtctgtatgttttacaattcatgcatattgatatcgagaaaaaatgattctatcgtttccgcactgcgttcagataacgctgatagcacgcttatgatattattaaggataacgcaccgggtgcacacggggtgttacaaatggtaatcgattaaaatgttcataaggcaatatgcagtctaaaacacatgcatttaatcgattatttcatatatgtaatcgactaaatcagtgaaaaacagtttttataaaaatctaattgcctttatgagtttatatctaaatacttattaccatatgattaaacatgattaaatgtatgtacgaatgaatgaattaatcaaggttagtgaggattatgaagctttaaccacttgaaccaagcttaagcaagaaattacaaatgccatcaattgagtgggcatgtaaaacatcaaaacttgcaatcttcattcttcttgattccatatcttcatcttcctcatagctaacagtctccacaccgatctgaatcagaatatccaactaattttggttctacaccagcctctctttttggaaaccaaaattaaaaaaaaaaagatgtaacaaaatccattgtcccttgtacatatctcagtatcctctttgcaactaacaagtaagactgctttggctcttgcatgaatttactggctaacccaacgctaaagcatagatcaggccttgtattgcacaaatatctcagtcatccaactatctttttgtaataagtaggatcaaccatatcttcatctatatcattctttaagagaagtccaacttcaactggtgtttctactagattgctttgctgcatgttgaatctcttcaatagatcttttgcatatatagattgatgcatcactgtaccatattgagtcactttaaaataaattaattctcagaaagtaagtgaggaggccaaggtcactcatctcaaattcattcatcatttgacctttcaacatgttaattgcattttcactgctgccagtaattagaaaatcatcaacatataaacatattatcaatttttctgctttctcactacttttccagcatttcacatagactccatgttttgaggtgcatttgtcaaaaccaatttgggacaagaagctgtcaattctcctgttccaagctcttggagcttatttaagcctatagagtgctttcttgagcctatacaccttactctctttacctctgacctcaagtccctgtggttgatgcacataaacttcttcttctaggggacgattcaggaaagtagattttacatcaagttgatgcatgaaccagtcaacattggttgcaatggctactaccaatctgacaatttcaatccttgccactggtgcatatatttgataagtgccctattttagtaaaattagggttacaatgtcggcacttatcttttggatttcagtaaattttcttataatcttgccctaaacctagatgatttgtatttagtacttatgtaaatgttgtttttcccattttagaagattagtccaatcatatgttgtattttgataggttctgatggtatccgaagcatccaagcaagcaaagcaagcgaaaagggcataaaaatcaaatgtgttagaagtaaaatggcccagaactcgtccaggcccatgacctttcttcaccattaagtctttaactcgcccaggcgagcatcctcagggtaaatcactcgcccaggcgagcttcaagttccaaggagatatgattaactcacccaggcaagcaaacacaagcaaaatcactcgcctgggcgagtgggctcaagcaggtgaccaaatcctataaatagccatgcaaaacttgaaggaaagcattcctatttcgaaaattctcatccaggaatgaaaattcttagcttagggatgtaggattagagtaggatagcttagggagagtgagagaagtgagaaattagtgtggaaactctactggaaagatgcgatgatggttcccttcatcaattcttccattgaggaggtgctctccacaatgattggctaacttctcttaaggattggatgtaatcttcttacccctatgtatctcttaatattatttatgtatgtatattttctattccttaatggtaatttcattttgttcttaatgcttgactaattgatcactagtctcatgaaattagattctaagcttgactggaaagtgcccttagaatttgaactaaatgattttactcattacattacgttgctaggaatagagcataacattttgattgcaaatagcacatgattatgattataatgctgaggtatttacttcatatgcgagggatcgatattcggtagatatccttaggattctaaaatgcgagggatcgatttagagtgaaataatgtgtgcatcaataaggatagaaaatgatttatacatggtaaaagttaattgaatactaagggtatgaatgatgaaactcaatctcactttctcataaatacatttcattttactagtttcgtaattttccgttactttcgtaaatcacatgaaattccactcatccttattgtacataactattgaactgtcgaattttatttggattaactgggtagctcaagtccctatgaagacgatcttttataaattttgtaacttacaacgacaaattggtacgcttgccaagagtctaacaatatttcatcataaccaattcctactttctgcaagaaagcttttgctaccaatctcgccttatacttcactacttctcccttaggattaaccttcactttgtagactattaggaattttcggcaagtgcaccgatttgtcattgtaagttacaaaattataagatcgtctccacagggacttgagcttactcagttaatcaaaatataacttaacagttcaatagttatgtacaggtaggttgagcggaatttcatttgtttgagaaagtaacataaaattactaaatttagtaaaatgaaatatatttatgagaaagtgggattgaatttcatcattcttatcctcttatatccaattaatattaccaagcataaatcatcttctatctttgttgatgcacactattttacctcgaatcgatccctcgcattcgagttctaaggatatctaccgaatatcgattcctcgcatatgaagtaaataccccagcatcaagaattataatcgcgtgctttatgcaatcagaacgttatgctctattcctagcaacgtaacgtaatgagtaaaattattcggttcaaaccctaagattactttccagtctcacttaggattaaattcatgaaactagtgatcaagtagaatcaagcattaagcacagaatgaaattaccaacaaggaatagaacgattcatgcataaataaatattaaaagagatgcatagggttaagaagattacattcaatccacagagaagctagccaagcatggagagaacctcctcaagaaaagaattgatgaagggccccatcattgcttctctccgacagagtctccacactaatcctcacttctctcactttcttaacctacttaatactactatttaaccttcctaagctaaggaacaagcctaagcaagaaaactgaagcaaaaagcatgctttcctttccaatttcgtggcctatttataggaatcttcctcctgccagcttcactcgcccagaccaccattttcttcatgttttggtcgcctgagcgagcttaacatatcttcttggtacttgtatctcgccttggcgagcaaaatacactatggttggtcgcctgggcgagttcaagtcttaattatgaagaaagctttgggccttgatggattctgggcctggtttgcttgttacacctcccatacttgctatataagccttctttgcttgctttgcttattcgaaagcctcggaaatccacggaatctatcaaaatacaaaacatgattagattaatcttccaaaacaacttttatttaagtactaagcatattttaactaggtttaggcaagtttataggcaaagttaaatggaatcaaaagataagtgccatcatttgaaacataaatttaactgaaatatggcacttatcatagacctatttcagtgctataggcttcttgtgctgaggaggatctaccaattcccaagtctgattcctttcaatagagttgatctcctccttcatagcttttaaccatttttcatttgtcactgccttttcaaattcaacaggctcaacttctgctataagtgcaaaatgcactagttcaccttctgagtttacgactgagtcttgaaatagctcatagtctctcaaatgagatgacaattgacttatcctagttgatcttctcacagtttaatctccactgtcagttggtgcagttgaggtttcttcttctagaagtatcctggactgagcctctttagaggttgttccccaattctagcttttattttcatcacatatcacatccctgcttacagtaacttgaccattctctggatcatacagtttgtagccactagttgagtagcctggcaaaatgtgttgagtacctttgtcatctagctttcttcttagctgatcaggaacatgtttgtaacaaattgaaccaaataccctcaagggagtcacatctggctttaatccagtccaggcttcctctggtgtcataccttcaagtctcctagtaggagatctgttcaaaatataagttgatgttgatatagcttctccccataagtagcttggtaggttttttgcttttcagcatacacctcaccatattcattattgttctgttccttctctcagttgtaccattgcgttgaggtgtgtaaggtggtgttacttcatgaattaacccttcactttcataaaactgtttcaaatcatttgacacatattcgcccccaccatctgtccttagaatcttgatcatttctccactttgcttttctactagacatttaaattatctaaagacttctagtacttcatgctttctcttaactaggtagatccaaactttcctagttaaatcatcaatgaaagagattaagtacatattacctccaggagtctccacttgcatagggccacaaacatcaaagtgaatgatgtcaagtttctcagttgcttttgtgagaagatacttgttgaagctgcttctagcttgtttgcattcaatgcactccttgcacacttcttttgggactaagacctgaggcagtccttcaaccattttgtgttgggcaagaagatgtaggtccttgaaattgagatgaccaaatctatgatgccataaccattccatcttgttttctgaggttgcaagacattcatgcttcaaaatattcatcccaattctaaaggtcctattctgagacaggtttgccttaatcacaagtttctggtctttatcaaacactttgagacaattgtcctccatcctcataacaaatcctttttcaagtagttggcctagacttaacagattagtcttcatgccaggtacaaacaacacctctgcaatgacagtatcttttccatcatttcccttgaatgctactttcccaataccttcagcagtcaatgtactatcatctgcaaatcgaactctgctcttggatgattcattcagattgatgaaccaatccctcttccctgtcatatgagtggagcaaccagaatctaagtaccatgaggagtcacttgatgattcactgctagtggtagccataaccaatacaggttcagaatcagagccttcatcttgagccaattttgcatggttactgggtttgctcttggcaccttctccttgccaacattcttttgcataatgaccaagtttctgacagttttaacatttcacctttcttttgtcaaacttccactccttgttgttgttggagtttgatttttgagaagtttggcatgttgttttccctttggaggattcactgccttcagctgtcacttgttcttggttctttgtggtggtgtttgacttgtttcctttccatggtgctttccctttccctttgtaattggatcttgcatgaagtgcctgttcttgatgggatcttctctcattgattctcatctcatgtgcctcaagagagtgttgtagttcttcaatttgcattgtttctaagtcctttgactcctcaattgcaatagctacatgatcaaattatggtggcaaagttctcaatattttgtctaccacttgttgatatgagattgtctccttgcgggccctcattgcatttatcagttcttgaattctgtcaaagtaatctgctatggattctttgtcctccatggtgagaagttcatattgccttatcagtgtctactgcttaatcttcttattcttctctccatttccatatgttttcactagaatatcccatgcttccttttacgtggaggctttgaagattttattgaatatcttcaaattcacacattggtagacgaggaaacgtgtcttgctatcaagtttctgctgctgtttgaaggtttgtttctgctcctcagtggcattcctgctaggttctgtaaagccacttgtcactacttctgccacttcttggaaaccaaagattgtcaacattttgatccgccaattatcaaatagcttgccatcaaatactggaagggacccctgaacaatactgttggagcttgtcatgtctgcaccctgctcctttcttcaatcactatgccagtacacagttggttcttccttagttgttcttctacccaagaacaatcactcaaccaccactcctcacaagaaaatggtggagaagaagactcaatacacaagacttgcaagaagacagaaagtatctctcaagaacacaatcaaaattctcaaattaacattccttacaggtgtaggatctcacagctcttgataccatgttaaactcactcaaacacacaacatacaattgtatgaaaactgtattgacaacaaaatttagaaaaaaataagagtatacaatatatgaaccttgcttatatagcatgtaacaaatattaataatgagtcactaactcatctaattgaaattagatatctaactaactttcaaactttaaattatttctaacattaatttgattcttttgtctaaaattctaaatggacctatcgatgttataaaatacatattagtaataattttaaattgctacaaactgttgtgacaacattagcatatctttcacactgttagttcattttagagatgaaaggatgaaatttaataatttttttaaaaagattagaaggcttaactgaaccaaaaacaattaaaacattgaattaaacctaaaagataaattaaaagaaaaaactaatttaaagattctttctttcttctccgagtcaatcctctcgcacccgaaatcgagagtattcgagtatgaataataataatacgtgtatcatccaatgaaacaccaccacgtaagatcaaaactttgacctcgtcgctgtctctctgcaccagagtggttggcattgccaccttgttcggttccacacttcaattacttaccattattaaattctcttctccctgctaactctcttcttcttcttcttcttcttcttctcatcaaaccaaaacaaaacttcaatttctctatgatcatgatgatgggttcaaacccaaaacccctcatgcacctttctcttcttctctttgtcctcttttcttcctcaactgaatccctcagattcgaaatccaatccgggcacaccaaatgcatttccgaggacatcaagagcaattccatgaccgttggcaagtaccaaatcgttagccccaacgagggtcaacctctgccagatgctcacagagtcaccgtcagggtactgcaacaataaaaatcgaaactttctcatacccagtatcgaatcagatcgtgttctgtatttttcggttaatgggtaattttgtttctgattttttttttttttttttttggggttaggtgacttcgtcttatgggaacaactatcactacggggatcgcgttcagacggggcagtttgcgtttgcggcagtggaggctggagattacatgacttgcttctgggctgtggatcacaaccctgtggaaacgttgactgtggattttgattggaaaacgggtgttgcagccaaggattggtctaatgttgctaaaaaaggccaagttgatgtgagtactgagtagagtagtcactagtcactagtcgctactatgtgtcacttaacttttttgtcttaacccgcctgtttatattggggaaaatcctttcccctgacttccggagtttggcttagtgataagtaaagtccgacgaataattgtttcctcgatcgaactcgatagtatctgaacgattaaatcttaatttcaacacattaactacttgtacccaatcacttgattctatgtgtcacttaactaactctctatatgatacactctacagttggttttgttgttgaatatagtgttgtttactttgtgtgttaattttgtggtgttgtgatttgtgtcctctagtatgatgtgagtagagtagttcactactatgtgtcacttaactaactctctgtatgatatatcccatatagttaatttggttgttaagtatagtgttgtttgtttccttggtgtcttttcttgtgtgtgggggagggggaggggggggtgggggtggggggttgtgtggaaaaaaatagaatttatgtattgtgttttgctagatttacttgtgttagtttcaggatagctgatttggactaaaatcagtgttactatgtggtatttgtgcctatgttaagattatttgagattaggatatcttgcaaggtacttgatctgattcttgatgattaggaatttgaaatttagaaagttgctactgatggggctgcacctccacccatgatattgcagctgcaattgtagttgtggaccacaatttaaaaccttgataagcacacacttggtattagtgtttgtgtgccttagggaaaagtacaaattagtagacaatagcacaggttttgcttctctaatttagtgattagaggaagttgttaagagagatctcatggtaaataatatctttgaagatttagtctttaacttgagaggaatgacgttatgtcgtgtgattcatgtagtggaccccacatgttaggataaggattttgttgttgtcgttgattgtgttactcatgtacacacaaggaaattaaggttgactatcttatgcagcttatactgatatgaggtgaatgtgtcctatgtgagatttactggctgaaggtcaatataatctgattgatcaagtagtgtctgtcgtcagttaccagttataatgagatttgtatttggacttgagagtagccttatgaatttctaatcatggtaagcatatagggcattataggtttcttattttggcaagcttttgactgtattgaatggagacaacataatcacctatcatccttgcaaatttgtaactcatttccctacttgtaacttttgtttgctttacgcttatcttaaattgataagcgatagttagcactttttgtttgcttattttctgttgacaaaattggctttcttgaataattgctaaaattcattctttttttttttttttggtattatttctcctcagtaccaagggggtctagatcagttggttgagcgggcttgtaagtgttgtaaacctcctggtactgtattcaattcctacggataaaaaaaattattcctccccaatatattttttctggactttacagtaatcctgctgatatctctaaaatcaatggcatattcttgagcaaataaaaaacctacttaaaacctcaccatcccatgactcccaccatttctcatttgaggcataaacgaactcgtgattaattggtttttcagttactagacctaacttgtaatcttcgctgacataatatttggcaaaagaaaagaaaaaattcttacatcattttcattcacctgtactaggtaatggagctagagctaaagaagttgcaggatactgtttcttccattcatgaggagatgttttatcttcgtgaaaagtaagtgcgttacaattgctaaattttttaattctttttgttttttctgaatacttttaattctatatattggcaaaagaaattataacaagcattattcttatttttgttgaaatacttaagaaatatattctgtaactgagttaaatggtattgtgtaccaataacggttgacacaagtggtagcggcttgtgtcccttaatcaagtaatccagagttctaatcttggttaacccttggatatgaaataaattgtgttggaagggggaatactcactttgtgtgtgctcaaggtccccgacgaaaatttatcattgctttcggtggggacaacttcataccaataccatggttaccaaaagaaaaaaaatagcattgtgtaatctttgtagccgacttcaattagtaggataaggctttacagttgatgtacttaattaaataaatacactgacatgagatattgtaacaatcactattcttactattgttttaattttgtatttccagagaagaagaaatgcaagaacttaacagaacaaccaacagcagaatgttctggttgagtttgctttcgctctttgtctgcttatcagttgcagggatgcaaatatggcacttgaagaccttcttcgagaaaaagaaactcatttgaaattttgtgatagtgattttacatttttcctcttctgtgctcttgtaaaatataccagcattaatttatcctgaggatacacataacggtagtcagtataatctcagaatatttcctttgttaaacgcaaatcagaattatggcaacacgagtttcagacgaaatgttgacgttcttcaatttagggcctttcttcctcgtcttgttttaaataaaaagccattaagccgtgagaatactttgaaatcttatcggacagtcaaatatcctatatatgatgattacctggtagatggttttgtaataaaacttattatattcataaccacctcgaatcaaatcagagggtgagtgaatagattgtccaaagtttgtatttaacagtccatttcctatgataggcacttcaaaaaataaatttgataaataaaaaaaagagcatgaatgataaaataaggtaaattcaagttctataacttaaagttaaattttgaatttaatttgcttaaatagatgacttaaggttggttatgacgtattcttttgcagttatttttatatactctttagcatattaattatggtctgagtgagaaaaaagagcatattaattattgtatgattttattggtgtatagattagactttattaagaaaaagtaaggttcaatgaatgggtaatctttatagtttacacagtaatttaagagggattaatttttcactgtaaaagaataccctttgcgcaaaaaaaccaaaagatttaagactggaggtaaatttagttaacttgccaactatttgtgccttagttattaagttaaataagttagatttagggatttataaatatagtgatttaaaagaataaattaaattttgagctaatggcgcaaaaagaagattcaggggttaaaaaaataaattaagtttgagctaaattactatattttttaagatttatatacttcatttagtatagtgaagtaaacctaggtccctagttttagttcatatagtatttattactttaatcttctcgttttataaaatgttattattttaatccttaatataataatatcaaccaaaaacatagtgaaaacgaattaaaattcaatttaaatatttttttaaagtcatcaatttgttaacatgcttataaagaaaaaaaagctgatatctgaacttaggccgtgtttgttttagagaggacagagagaaatttggtaggcctcatgtagaattcacatcttttacattatattttaattaaaaatttatcttctatttcgatcatctctatttccatatagcattaacaatgtatgaatccacttaaagagataaaatgagttgtttatactaagagcaccggagattctcttatagctccatgaaactaaagagatcgtaaggcacatctgtcattttcttttcttccacttttgcaattaggtagaaagtgggttgaagcttgcacattatggtccccagtgcacaatttattaagttagcatttattcacgtgaaaccagcgaaaagaaactcccatgagaagtgcaatcccaaaaaagttggtagcatatataccagtggaattggtaagagaaaatagaagagtgaaaaatataactagtattaatttttaaacgaaaaaacatggaacataaaaaaccgatagcatgaaatgacctacttcctcaattagtttgtacacttgaaacgctttacacttaggcaacaacttgcatttgcccacttgaatgaaacaagagctttaatgagaaaaaaaacgaagaaaccaaaggcagggcaatcaacatcaccttttctgctcattaatccaaacagttgaaaacaagtattgactttgcaggtttggctcaaccaatccataaatccggcaccaaaccagagaatggtaatggtaaataatcatcttaatttctgaacaaattattgctattagacatttatgaggtaaacaagtgccagtgatgctctgtaggtaaattctccttgatcttttcaagccgtttaaggatctctatgaaggatggtctctgactcatgtcatgagcccaacactgctctgttaaccttaaaagacatgaaaggccaaagtccataagatttaattatatgatcgaggcatgctttgaacgaaataaatgtttacttgctataacttttaatagcctaatttacatagcattccagaacctctaaataaatggtcacaaaaagggttaatcatatttatggctgtgctagtcacacttggggtttgtgaaataggaagtactaagcagaaacaataatcatacaattggtcaatgttcttccatgtatggtgaacgagggaaaaatcataaccattattaaccatccctttaatttttttatagtctataataattagtcagactaagagataaagcatactgcccacacaaagtaagatcatagatgccgaataagtgaaaaggtaaaagatgggacaacaaactaagatgtcttttgtgatattaaaggcaatatacaatagtaagcctagtaacggcgtatcacatggcttagatgtcacagaacatttaaaaacacactagagcatgtgcagttgaaaatctcaaatcaaaccaaatcgagtttgaaacaaagcaaagaagaaattaatcccaagtcaaatgttgaacaaatgggaggtcatacttaaaatgtcgaggatatgaattgtagggatgaattgctctgacatgatataccttctctaatggaagcatcttggaaagtacttatataagacccatgtaagtaggtgcttccaatagtaccatttttttaagatatcaactttccttttcatagctcctcccaaagtgaaattagaccacattatccacctaattttaagccaggacgcatgtggcctacatttgagacctttgttttttagaattgtgaaggacctattcgcttaaaagcttcaactatttggtgcaagcctagaaatgatttatatgtcgcaaacatggcttgttatgtgaaagccattttaggcttcaagtgtgaacaatcatagagacccacttagaagaatgataacaagcccttgaccacttggtcaaagagatcatgataccatgtcaagaactagcgttcataatagagtgctgtgaaattggataaaagaaatgtatcagacttactcttgcaattcaggggtataaccctttgcccgaaaatgaggcctgtgtccctcagcagcatattttgctccttcataaggttcacgacttgcaaaaggtggttcaccttcaagcatctgcacgatataaggatatcatgcattaaaattagcttcaaattgtatcacataaaaattcagtattttaagcaagcagaattacctcgtacaaaatcatcgcaaaggagtacacatcaaccttcttatcatatctccgatgtttgaaaacttcaggagccatgtagcggtctttgttttttttaatccccaagaagaaggaaattaaattaagttttgcacaagaatgggaactaacacttaaaaaagaaattctgagaatactcacagctcccagtttcaccagtcatcttgtatacatcatgagaactctggaccgtgataagcttactcaatccaaaatctccaacttttaaatggtcggcactagaattgactaaaagaacattcctgaaatttcagaaaataaacttcaacatataatacaaaggcttcttaatcccagctgcatgtgttttacgacataaaattttgtcgatctagtttcttcaattctttcataagcaatacatcatgacatattgtatgtagcagcctagcaggttatccataataatattttcatatataggttgcaaataaccaatttaccttggctttaagtctcgatgaattataacatttggttcattgtgaagataggccattcctctacaaaacaatattcacaaaatgtataattagcatagtgaattagtgatgagattaggtgaagctgaatttaaaccaattcttctaggtttcctaattctattatctcaaatgataaaatacagaatgctatgaatttggcttagttatccactggtcatagtattttatagagatcaaggaggctagccaaagccaaatacaagtgatacatttgtgattcatgttggtccaatgacaagagcttgggctatgaaaggtaaagggactatggcaaacctagttactaaaattcgtacaacgtcatggatagcaatgggacagcatgggtctactagattgaagctttgaaagactaaatggagtagtttaggctatttttttttttttgaaagtcgtttaggctatgttataaagtgaagcaagacagaaataatgaggtgaaattaatatgagccttgcaaagtcaacaaggcctaatttgggctgctagtagtttaggaatacttttgttagttaattatgaattttggacttgtaatagtttaggacttattttcattagttagttagcttccatgttttgagctttaatgaccaaattgtattggttatgttttgcctatatacagtaagaaaaacattcctttcaggagttgaacattaatttgaataagaaagtttagtttctcttctccatttgtggcagtttctcttcttcttaggggttgtaaaattctactagaatgttatcgagaatcatgagtagaatcttttcgaaagtttctctcagagtatgtgattgcaaaaattctcactgggccaaagttgatcaattttggtccgtcagtgaatattattatgggatttaggaattagactcatacgtagtcagaaacaaatttcaattcaagattttcttgtgtccatatatcttttatccatcttcttttctgtatcagtttggtatctgaggctcctgattcttagctgaatattatttgttttgtggcttcatattttcaaaaagaataacaaaaacaaaaaaggaaaaaaacacttctgcatttgatatttattcctttgagtcatcaaattattttcttgtttctgcatccttttctgttagttgacagtttgtcatagagttgtattgtacctatctcttttgtatccttattaattattatcaaatagtccttatcaattattcttgtttctattcgtagatatcctcatcaattcttcttgtttatgcatcattatctattagctgttagtttgtgatcataaagttctggcgctcatctctttcttgtccatccttcttagatattcgagatttgctcacacatgtgataatccaaataatttcccttatctttctataattttgaattgtttaacttttactatagcattctaaaaaggaaacaaaaaggcaatcagaaaaaggaaaatataaataaaaaaatattctattttgatttttagaccataatagtgtttggagtggtcctaagccccttttttttggtctaagtggtttgattgttactcctttctagtttcctcgtgctcataattttttgtctagtgatcctcttgatttctcagaaaacttgctaccaggatcatactcttcttgatcttatttagtgagatttgagctctcctttgaagaaattgagaggtggaactcaaatcaagagtgtgacatattagagggtaagagccaaatcaagtgaacaaatatgagcgcgtgtgatcatcatttgagtgcattcacatgagaatattattgtgtgactttcttttttgttcactaacattttacgcagagattttatcatgacttctaaatcaagatacatggaagaataagatgttgtattgatcttgaaagctatgcatcaacaattagaacacatgatactgtgttataagaaataaaggaaggattgcataggaagagtacgcaaattacaagcttaaaatgaaatttaggacggataacggtggaaggtagcaagttagatgatatcctgattatagagaggactttgaacagtaagagagtgaagtttaaggtttctggcctagcaggggtagaagagaaacaagaagcttctgtggcatgagcaaatgtcacagttcttcaacaaactgccaggtgttagataacagatgtaaagataataggagagcacttttgggctaatttgttttttatgtgcttaattggtcgtcgctaagataatttcctcctatcctcctcttatgtatttctcttctattcttaataatttctttatagaagataaaaataagaaaagataaatatggtaagacaccatacctgacaatatccatggaaaagttgatagctgttgcaggactaagtgcgcctttttctttgaggtactgatgaagatcaccctatatataaatgaaacagaaattcaatttaaagcataagtatgttaaaccaaaaactaggtgtacatctgaaggaattatgttttattcgcatacccctcttagatactcagtaattagcataaggggcttcctgtcagtaacagctccaagaaactgaactatattggggtgtcgaagcttcactaacaaattgacctcatgcctgaagtcctgactgtataaaaattaacacacaaaatatgagatattataaaaaaaacggggacagagaaaatatgatttatattgctgcaacccccctccccttcctatagttttgataattcatcatacacagacataactaaccatccaaatatccaatcagttagaataaatcattcggccctaaagaggcagtaggtttaacctgaacaaaatgcatttagcaaaaccagttcaattactagccaacatctctccctatagccccgagtaagacttgacagatgacaggtaagaaaaagtcattagaccttagttttaacaacttcaccagtcacaatcacaatcaatcaaaacacattcgcatcacaaataacaactaactagcagcaaccaaattgaagacaaaatactagagacgaaagaaagaatctcacatcaccaatctatcttctgaaagagatggaagaatacgtttaacagcaactggtgttccacgccaatgggcttttaaaatctcaccaaaagatcccttcacgaaacatgaaaacatacaagaaaacaatttaagtcattgaaaaaaaaaaaaaacctaaagtcttgtactcttgtttgattattattttttaaaaaacagttttctattttctaaaatttgtttgtcccttgagcacatttgaatgtgcttgctcttgaccacatttctattttctaaaatcttgtcctctgaacaattaaaacagagcatttgaacaaaacagaagaagatgaaaagttgtttctgttttttggtttttaaaacacttgttttggaaaaagaaaaagaattgaagcttagagtgtttggtttggtggtgagggacccaaaatcatggtggcaccttgaaaaagctggaggcaacttagtgttgctttaccttcaatgtagaaaatcagaattgattttgacaaaagtgaaagcattaatagattgctgattagtgtaaacttgttttcaatattttaaaaaaagtgagaggaatcaaacagggcgcaagttgttcttttcttcccacaatcagccataaacaaaactgaaagccaatgactgtccttcgatgatgatttcacaacaacaattcaactcactatcaaacttgcaactctaggtactaaagcatacaattaatctaagtttaagaaacactttctgaaatgcaatagtggaacaaatagttgaccaaaacacagagcagcaagctgtgaaatccattgaccaaaatcacgtccacggaaacagagaaaaaacgcagaggcgaaaccaaccttcccgattcgcaccgagttagagaaatcaagctcggtcggctcgacttcccaatcacacttgttcggcaacggcggcgccaccggcttcggctcgaaatggcttccattttgcccctgccaccaaccatcatcaccgttcaaatctcaacaacttcactcataatccaaggttttaaatatcggttgtgatttcgtcgcgtttgttaatctcgcggcaaatcgcggataaatgcaaaccgttttttaaaaccttgctcatcactgaatacaaaaattagacaaaaaaacacacacacacacacacacacacacaaagaaactcacaaaagacaagccaccatgcgattgcaaaagctcgatcacattactcttcttagctccctccgcatccgccaaaggctgtccaaaatttccaaaacccaaatttcattcactcatttcgtcttcacaacgaatcatacagtaacaaaaataattataataaattaataataataataataataagatttaggaatgttattagtatgtatgatgattacggtgtttttccagcgatcttgcgcgttgacgtcggcgccgaactcgatgagacacgtggcgacgtcgatccagccgtgtagcgacgccacgtggagcggcgtgcggttgtcgtagtctctggccttgacgagcgagggatcctcctggaggagcttccgcacagctgcggcgtcgttttggtgcgcgtgccagagtatcagcgacgtgcgactcactctctgcttctccttctccttctctttctcagtgctgtggctgctgctactacccgaactcatcgcttttcttcttcgaacttgaaccctaatcgaagaatggttcgatttattcaggcgtcggttacttttgcttcttcttccgcgttctattataatttggttttggttgctgttgcctgttggttggtcctttacctcaacgatattttgaatgtcaactcagaaactacttttttcttctcgtaattcgtaaatttcgtcggggggaataaagcgcgtggggtatattatgtgtatatgctttgcttttgctgtcacagtgtcaccttgttagtcaccgtttaactttaaccgcttcaactgtatcttgaaaaaaaaaaaaaaaaaagctttaaccgcttcaactgaaaccggggatttacttgaatggataattttactgtttcaccttgtctcatcgtagttatgaatcaacgataatatgcattttaatataatataagtcacattaattatataaattacgtaatccttacttatcgaacttatcacttgtttatgaagtctctctggaccgtgacgaatgacgacgaagttaaaagatttggattggagagattttggccttatcgttaacttctttcaaatatgctgttagatttctatgtgaattatggcaaatggattttagatgctctgaatgatgcaataggcatgttaacattttttacgctagatgttgctattagattggggtgctgttatgaaggcttgtaaatgattagttttgttaaggtgctttagatcaagatttgtctttttttttttaattaattctggtattttttaaccgttaaaattataatttaaaatttaaaataaacattaacagtttttaaaatcatcacattttttttataaaaaaaaatagcagtcatgcatgtcattacttaagaaatatgacatgaattatttaaagaagataaaagtaaactaactttgcttcgtgaattaatttttatcattttataatccaacattttcaatattttacatgccaagtacccaattattacttcttacactaaaaagcctccctagacattgcattcattcaaagcagccgtttgtatgctatcattaattcaagacttccttgagacaaatggagatgccaactcccatcacaattcttaaccaagtgattaaccgtaaatatatacttttgtgacatattgaaggatagacacaaaagtaattatttttttattacaaaatttacaaaactcaaatattctattcaattaactgtgaactagactccctcttaattacaaaagcaattataaattccaagaagtcaaaccatccgttttgagctttaactttagtaagttgcaatagcaattagcaatactaaactttggaaatgcaagaacttggatttatctttagtaaaaaaaataatatatgtttcaacaagaatgcaaacacggcgagaattttggttttatcataactggcatcttgcaacgtggttagcagttgactactcctagggaggaaaaatagtttcagaggaggattgaggaatggagtgcataaagtatattaaatttaatttaaggtagcagtcaaccaaattacaagctgcttagttagcaattgttgttttcccttgcacaatttgcttttttttttaatgttataaaatgggaatatatatatatatatatatatatatatatatatannnnnnnnnnnnnnnnnnnnnnnnnnnnnnnnnnnnnnnnnnnnnnnnnnnnnnnnnnnnnnnnnnnnnnnnnnnnnnnnnnnnnnnnnnnnnnnnnnnnnnnnnnnnnnnnnnnnnnnnnnnnnnnnnnnnnnnnnnnnnnnnnnnnnnnnnnnnnnnnnnnnnnnnnnnnnnnnnnnnnnnnnnnnnnnnnnnnnnnnnnnnnnnnnnnnnnnnnnnnnnnnnnnnnnnnnnnnnnnnnnnnnnnnnnnnnnnnnnnnnnnnnnnnnnnnnnnnnnnnnnnnnnnnnnnnnnnnnnnnnnnnnnnnnnnnnnnnnnnnnnnnnnnnnnnnnnnnnnnnnnnnnnnnnnnnnnnnnnnnnnnnnnnnnnnnnnnnnnnnnnnnnnnnnnnnnnnnnnnnnnnnnnnnnnnnnnnnnnnnnnnnnnnnnnnnnnnnnnnnnnnnnnnnnnnnnnnnnnnnnnnnnnnnnnnnnnnnnnnnnnnnnnnnnnnnnnnnnnnnnnnnnnnnnnnnnnnnnnnnnnnnnnnnnnnnnnnnnnnnnnnnnnnnnnnnnnnnnnnnnnnnnnnnnnnnnnnnnnnnnnnnnnnnnnnnnnnnnnnnnnnnnnnnnnnnnnnnnnnnnnnnnnnnnnnnnnnnnnnnnnnnnnnnnnnnnnnnnnnnnnnnnnnnnnnnnnnnnnnnnnnnnnnnnnnnnnnnnnnnnnnnnnnnnnnnnnnnnnnnnnnnnnnnnnnnnnnnnnnnnnnnnnnnnnnnnnnnnnnnnnnnnnnnnnnnnnnnnnnnnnnnnnnnnnnnnnnnnnnnnnnnnnnnnnnnnnnnnnnnnnnnnnnnnnnnnnnnnnnnnnnnnnnnnnnnnnnnnnnnnnnnnnnnnnnnnnnnnnnnnnnnnnnnnnnnnnnnnnnnnnnnnnnnnnnnnnnnnnnnnnnnnnnnnnnnnnnnnnnnnnnnnnnnnnnnnnnnnnnnnnnnnnnnnnnnnnnnnnnnnnnnnnnnnnnnnnnnnnnnnnnnnnnnnnnnnnnnnnnnnnnnnnnnnnnnnnnnnnnnnnnnnnnnnnnnnnnnnnnnnnnnnnnnnnnnnnnnnnnnnnnnnnnnnnnnnnnnnnnnnnnnnnnnnnnnnnnnnnnnnnnnnnnnnnnnnnnnnnnnnnnnnnnnnnnnnnnnnnnnnnnnnnnnnnnnnnnnnnnnnnnnnnnnnnnttttttttttttttgttttttaccattttgggtagattttaaacttttatccaaaagatcgtaactgttgttatgacgtctaagtttaaagtcgtaacactgtttatgacttctatttttttaatattttttacattaaagtcgtaaaatttttacgacttctatttttaatttttttaaattgaagtcataaccttttcattttttaatttattcattgttttcatatattttttttataaaaattgtaatatttaatttatttatnnnnnnnnnnattaataactttactatatacaataatttgtgattagagtgtatataactgtttatactattaaaacattctaattaaagtgaatgtatatttatatttattaataaaactttttgttataaatttggattgtagcagcttccttgatagataaggaatttgttacttcatactaatatatttattttattttttcatattttttaaaaataaaatattaattaattacagtatatttttatttaaaaagtatatatctaaaaaaactgcgtaaaacaaataatttcttaaatgattaacggtcatggggtacaaatattggttagtaattaaatcaaggaggctgctgtatatggatcctttttaactttttatggataaattcaatatataaactcttaagtgttttattggggtcattagtttggggtcattagtttggggtggttgtgagtttttggattttggattttaaatgtaatttttaaaataaaatgtgtttggtaaaaatgaaattgaaatgatttttaaatcatttttgaaacacttttacacctattttcagaatcaagaaaaaagttttatgaatttgatttttaattttaaaaaaatacacattttccacatttgataatgacactttttattgtcatcatcgccgccaccaccatcatcagtccaccatcgtcagtgtccttgctaatgccagtgtaacacgttaaaatcctttttctaaaatatttttttaaatcgtataaataataaatattgtgaatatgcctcattaaatcttgtttttatttctaagttgataaagtatttcaatatatatttttttctgataaaagaatgaaaacatatacatatatatatatatatatatatatatatatatatatgtgtgttgtgtttgattaaaacatgtatgtataattaaaatgctcatgaataaaggtattgtcaaaacacgttttctatttaaaaatcatttcaaaatttgttgtcatttttcttccacctttacacaacgctataaaaaaataatttataaagaattaacttgcacaaaactaaatactaataaattgaaagaaatacgtagtatacataatgatcctatgtgtctcttaagatataaacatagatgtactaaagtcattacatatgttaacaagaaaataaaatattcattgcctctcaaaactattacacaggatcaccaaaatgtttaacacaacaaaatatcacgagtataaaaatcttcccaacccaaatatacataaaaaagggaatacaaacttacactcggtgcagtcactacctaagacctacaagtgatatgtgataacgactgtcgaatcgctacaaaacaaataaaattaagataattctgtagcacaggattaatctaggtcaacttagagatacagtccaatttgattcttgacttaatccacttataaacagtagggagattttatcaaacagtttttagacagtgaacaaaaattgcaaaaacacaaacaagaaataaagaaaaatgtataaactaacagaattgataaaagatattataaaacagattcaagaatatcaatccaattcatcaaaccaagcaatgcaaattatcatagttctcatataatgatcatattatgaaggttcattcaatatcattagaagcagttcaattgaattaactcctaaatcaattgaaatcacaaaccagattgaaatatcatccaaacaatctatgattaaaattcaaaattagaaaataaatctataacctaattttttttcaatcttaaacatattcataatcatgaaaatcgtaaagaggattgaagaagaagatgaatattcacacagaaattagaatatcaaatcagaactcaaattctccttacttgaattggatccttggattcattgattgtttagccttccatgatcatcatcagtggaagaaccacaaaatttgtgtgagaaaaatagaagagtggagatgaaaggaagaataaaaataaataacaatgaagaatatttgagagaaaaagagagaaaaaagattttaattttgaaaacttgcacaaaaagctagaaattatgtaaacttgcataagaagctagaaattttctttttgtatctgtgtatgtgtgtgtcccctcaaataactcctagctatactaatatatagttattgaacaaaagtaacggatgagttttgattaggcccatctaaactaactaattatgttaattacatcaatcaaaatccaaactcgcgcccaaaaactcaaatgcagaggttttgaatttcaagcctaatttgaccctcaaaaaggccaaattgatccacgcttatctctgaaaaaattgtggctcttttccttagcttttcagggaatactcatatgctccatttggagttttgtagaatcctataggtcctgcacagtgaaggtaggtcaagtaagcacaaaatctaaaaataagcaacaattattaattaagcccaattatttgcctaagaccaaaactgagttaaaatgagaaaataagaatacaaaaaaataagctaataagaatagaaaaatattatactaaaaacgctcaatcaaattcccccacactatatcttttgcactcctaggcaaaactaaaagaaagactaaaaaaaaaacaattaaactagaataaaccacaaactaaaaataaaaaggtatgaacaaggcacacacatttttcaatggatcctaataatgcacaaaagagagaaagatggaaaatggaagaatgatatcaaagtaacaaacactacatgaatacatgatcacaaagtgaaaagtgaaaaagtagtcatgttaaaattaagaatgtatcaaagtgatagaaatctctcaaagaacctcatcaaatgtgtttgagtttgtgtttacactcaaacactacatgtaactagcatatccaaatattgacaagactctaatccactcaacttgaaatacacatgcatcaaaatatcaaaatggcttttattggtttgtaatgtatgctttaggtaagggtggataagagaaaaatatttaggataaaactgagagaaaagaggggcaatggggagtaagccaacaagtaaaaagagggataaaaacaaagaaacaaggtggagaataacaaaattaaaataaaagaacttacaaggatgaaaatgaaccacaacacacttttattgcaatttttttcttgtacttctttttcttttttttagtattttttatttttttttctttgaacttttgctttttatactctttcttttcttttcttttcttcctaatcaaaacaaaatataaatccctcacacttatttgaaactcactctcaaaacaattccaaggtccattttctctctaaagttaggataacctgattttccactttttggcttgtaatgaactacacaagaaagaaaaggctcaaaaagggtgacaatgaatatcaatgcaaagtaggtttatttggctagtggataaaaaaaagaaagtttaaatcatctcaatcaatgtatgtgcaaaaatgaatgacaagagagacaagacaaaacctagagtaatttagcacaaggatgaaatcaaacatgaaagaacatgaatgaaataatgtgattcattcacaaaggtccaagaactcacaaagcataattctatcacacataatccaccttaaattttatttttcaagcttacttatcatttcaacaattgcaataataattcacatcaagtaagaaatctctcaatccaacaaacattggtacatttctcacaatttatacaagttagaaatcttatgaaaaatatgaaaaagtggctaaattcaacaaaaaacagaaaacaacgactgtaaaatcttttatttttatttttattttttgtatgcaaaaacagtaaaaactgaaaaaaaaaatataaaacaaaacaaatatagcaaaacaaaaacaaaatacagaccaaaacataaaacaaataaaacaagttttataaatctttctccccacacttaaagtgcacattgtcctcaatataaacatgcaataatgaaaccaaagagacaacatagaaaagaaggaaaaaagaaactcctcaaatgccattcaaggcacatcatcacataaagttggtaagaccaaagagatgtatgccacaagctcttcccccacttgagggctctcatgaaataatttgagttgatgaccattcactttgaagaccttgtctataacttcattttaatctcaactgcagtatggaaaaacattagtaataacaaaaagttcattccatctaaatcgaagtttactagaaataagttggcaaaattttcttttttatttttttaaaattcaaaaatatcacagtaaatatctaaaaattatttttgatttttggattttttaatttttttaaattcaaaaacaccacaataaatgactaaaaattatttttttgagttttgaatttttttatatttatatctatcttctatctattatctagaaataaatttttaatttttgaatttttttatctatatctatcaatatctatcttcttttatctatatctatcttctatctattatctagaaacaaaattttgaattttgaattttttttatctatatctatcttcttctatctatatctattttctatctattatttagaaacaaatttttgaattttttgatttttttttttttgtaaacagatgaaattatactatactaatatcaatggtatctatactattatctaattatgagtggattaaagttggcacacaataaaccgtatccccgacaacgacaccaattttgataacaacgattgaatcgctacaaaacaaataaaactaagataattttgtaacacatgattaacctaggtcgacttagagatacaatccaatttggttcttggcttaattcacttataaacagtaggaggattttatcaaacagtttacagacagtgaacaaaaattacaaaaacacaaacaagaattgaagaaaaatggagaaactaacataattgataaaagatgttgtaaaacagattcaagaatatcaatccaattcaccaaaccaagcaatgcaaattattatagttctcatataatgatcatattatgaaggttcatttaatatcattagaagcagttctatcgaattaactcctaaataaattgaaatcacaaaccggattgaaatatcatccaaacaatctatgattaaaattcaaaattaggaaataaatctataacatattttgttttcaatcctaaacatagtcataatcatgaaaatcataaagagaattgaagaagatgaatattcacacagaaattagaataccaatccagaactcaaaatctccttgcttggactggatctttggattgattgattgtttatccttccatgatcatcatcagtggaagattttaattctgtaaacttgcacaagaagctacaaattctctttttgtatctgtgtgtgtctcctcaaataactcccagctacagtaatatatagttattgaacagaattatgggatggactctgattaggcccttctaaactaactaattatgctaattacatcaatcaaaatccaaactcgcagcgcaaaactcaaatgcaaaggttttgacttccaagcttaatttgacccttaaaatggctgaattgatccacacttatctgttacaaaattgtagctcttttctttaactttccagggaatactcatatgctccacttggagttttgtagaatcctataggtccttcacaatgaagataggtcaagtaagcacaaaatttgaaaataagcaacaattatcaattaagcccaattatttacctaagaccaaaactgagggaaatgagaaaataagaatccaagagaagtcaaataagctaataagaatagaaaaatactatactaaaaacgctcaatcaatatgtagtgtgtgcctctactgtgatcaatggtatctggggctcatctaatagcaaaaagcggcatcggatgtaaccaaagtgtgcgtggaagcacgcttcttccttcaccgtgtagctatagcggtagctattgatccaagtgaacgtcctatgtgaatgatccatgacctccccctgaaattggtggttgcaagggtgagtcatctgctcctcgaatgccacaaacaacaagcaatagtaaaacaaaattaaaacatacaatctatgtaaccattgcatgtggttatctaaacaaacaacactctcgcatcctaagcgcgtaactatcacacttatttcactacagggcccaatcactgccaccaatcctctcaagtcttgatggtcttacaaaatcacgtggatgacagtcgggagcgatcgctacatacggatacatcgtacattgaccctcatctcccaactcaaagaacatagtctcaaagcccgtcaggagtagcaaagtgaggcttgtgagttactcgcgctatatgagtgcaccaagtcacctctcactaatcccctaggttctttgaacctcttcgcccactacacccaatgtatctttgtccatcatccagttccttaacgcaaccttaccttctcacataaggaaatagaaccacttgtgaataataatgaataaatcaacagttccacaaaataaataattctaagataatttatactgaggcacggatttcaaagttaagttatctactatctaaaatcattatgtcgctcattttttcatagttttgctcctaacttatttttagtgctctgggagtctgatttttgcaaatcttatatgctacccgacattttcaaacctaaaaaatcattttgaggtcaaaactttaataaaaatagtccatacttctgtaactcagtccaaatttgtgacaaatttttcattttactaaaggtccttaaacttgttttatttgtaaattttgctagaaaaccccgatttgggtgaaattttaggcaaactctatgttttaacatgcaaacaactcatttttggcataaaaaattcaaggaaaacaacttgtaacatagattcaggatatgacagcaagctcaaaaatttcaaagcaacaacatgttcaaggaagttccaacaagcatatggttcaagagttggagagactctcatttacatcttgtagtctccactaaatttagaaggaagaatgagggagtttagattcaagtttccaacctttaagagtgcaaaataaggttttgaaactacaagtgagaataaagcacgaaaataaagtgaaaatcaagcttaaagttgaaaatggaggtcacttacctaagcttggtggaagaagggctcaagaacacttggtaaaacttggaagaaggagaaaaatatggtctcctctttctccaaaagctttagcaaaatgggagaactggcctaggctttggcttttaaaaaacaacacttattgtgggtgaaatgcttggactaatgaaattgtaaggcctaatctttatcttcttagtttaagcactttgaatgaccatgaatatgactaattggcagcttggacaacccttaatgtgctctccaggagctcagccatgccttatatggtttcttacacttcaaaactaactataaaaggacaaagtagattttttttttactaaaaatggtaaaaactgtctttgctaaaacaggtaaatcttaccataatcttctagattagtgtggtaacttcttagattaatgtgccaacctcccttgggatatgtgtactcagaatgaaccttgcacaaagtccactcacacagacaaattacacttcaactcaatgcacagtgtaattcttgcgcaaatgaaaatctaggtcagacaatttctatttctttgtcaagctttactaaatcacacacacacacacatagcacgaaatcctatgattaaaaacatataactactaaaattaaattcatacatgcacatatgacacaacacatagtttcctctgtcaatctgagttgtaatttctcaaggtgttacaactttaacttattttaactatcctaatcatataattagacactttaattagtcaccaactaattaaactaaaattgtatttttaaactagttatatagtcatttacaaaaatgccctcaactttaattaccctttttctaattctatggaatctaaataaccattaatcagccttaattatctccactttatttctaactaaacttacattacttactaattttatttcaatattttaatttctatttcttgattaaaatctagttattaacatttaggtcattaatgagttaatcattagttgaccagagaattttctctgaattatccttattttttctagactttaacttaaaaagttaagagtttaatcatgcctaggtatcttatgataacatctcatttttttaccatttcaataatcttaaaaacactacccaatcgtatatcaaaacaataacactttctatcacacacatggaatattgggatgttacagccaccaccaccaatatcaccccggtcattgccatcaccacaccaccattgttgtcatcgccataactggttgccacccccacaaccaccaacatcactaccaccatcgccatcatcatgaccaccaccattgccatcagcaacaccatcaccaccaacattgactgttacaaccaacaccactatcaccaccacattgttattgccaccaccatctatatcttcatcgtcgtcactgccatcgtgatcaccactaatatctctatcattgttgttgctgctgacatcatcattattaccaatgtcaccgtcaccacacaaacactcttaaactagttttaatataatatgaaactttcaaaataaatttatttgaaactaatcatattttaaaaattgatttaatttttttttgaaactagaactggttgttatttttaaaattttgaaactcaaaaataaaaaccaccccaaaaaggtcataaatttcttacaatcgtgaaatcaatttttatgtgtttggattaacattgtttatatatatatatatgtaagcattaacattgtatttaattaatacaagttataatcattgtcacattcaattccaataaaaaaaatcatcaatacaaatcaaaacaagtttatttaatataccatgtgttatagtttcaaataggattttaatattttcaaatttcgataaactaaattttttagtgtatgtaatagtagcaacaatagtaaatattattttataagttgtacatgcattaacaatacattagcaaaacaattatatgttttcaaataactctatcataaagtttgattttcattcattgatgaagtttgaatcataaccattgtaattttttgttcaagaaatttgattacataattatgttaatgctaatagcaaaagaaggatgtcgtcttcagcatatggaggcgacttggaatgcctctaactaactcaatgtgtcaaaatgtttccgttaattccaactcttagcgatggagggttgacgtggaatcctgctagggaaaaatgatcattcttgtgtgcaatattagagaatgtaaaagttagttgagtattttgttagttgattattctgttatgttagtcaaagtagttagcttaggcttgaaattagttagttagtttggccttgtatataagcatcaacataagctaacaagtgaaagagaattcataagccaagaagaaacaatgttgtcattgcgatgccaagcagcatgatttgcatgacccaaagtgttaacatccttgattttcgacttctcgacagctctcacactatgacacttcacgcggtgacacttcactcaacatccttgttggttagaatcctccacagattagaatcataagtatcccttttcgggatctcaaaaattagctctgtctacttctaagatcaatgaccgaccccacaaaccaacacaagacttctcaacgtgttttgttctcacttacactctttccaggaaatttgtcctcaaaccacaccgtattgggagagagattttctcttataccatttgtaacattcttgattttcaaattcaagaggctctcagtgttttgtcatcactcacatgctttccaggaaacttcccataaggtcacccatcccattactactccaagccaagcacgtttaactatgaagttcttaagtgataggctactgaaaagtagatgcatgttgtcggtataggtagtatcaattaattcatttaagtcatcctcaacagtacaatctcatacttgcatagcctccagatccttctctttctggtgtgattcgtcgaggtgttacacaaagcaggttcaacaattgaaccatcaacgaaaccaaatttgttcttgctaaaaagagccatcttcattgacaagaacaaatttggtttcattgatggttcaattgttgaatgtgctttgggtcatgcgaatcatgccgcttggcatcgcaatgacaacattgttgtttcttggcttttgaattctttttcacttgtcagcttatactgatgcttatatacaaggccaaactaactaactaatttcaagcctaagctaactactttaactaacataatagaatactcaactaacataacaaaatactcaattaacttttacattctctaataacacttggtctctggtccctgtatctgctaacaagcactgtattggctgtagatgggtctacaagctcaaatatagcctgatggaacagtggacaaatacaaagcttggttaatagctaaaggctacacacaacaagttggaatagatttttcacacactttttcacctgttgccaaacttaccttagtgagagtgcttgtagcagtagcagcaactaggaattgttgtttacaacaacttgatgttaacaatgctttccttaatgaggatctgtttaaggaattttatatgaacttgcctcaaggatacaaaaccattgctcttggtcttgtatgcaaactaaataagtccttgtatggccttaggcaagcctcaaggcaatggttttgctagttttcttctaccctgttacagtagggtttcattcaatccaaaaatgattattttcttttcacttatggctatggatccttattagcagtgctccttgtatatgttgatgacattatacttgctggcccaagttcttcatgtgttgctgaggtccagaccaagttacaatccatgttcaagttgaaggttttgggctctttgaaatatttcttagaccttgaaattgccaaatctagtaaaggtatttcactttctcaaagaaagtagaaactaactaactaatttcaagcccaagctaactactttaattaacataacattaatactcaactgacttttacattctctaatacaccgttagtgaatgatatgcattggactactattggttcaatggttgcaaccttcaagcatatcaatcgcgaatgtgatactactgcaaatgttttaacaaaatttggtttgtcattagaagagggaattgtgttctacatttaccctcctacttttgttatgaattcattaagcgtagacttacttgaatgccttaatgggttttgtgtaattctattggggccctcacccttaatattaataaaaaaataacaatagaaggaaataatatgttatatttttctcttttattgttaacaatattgtacctaaattgtcaattatttttgtcaaaattatgaataaattttgttgataaatgaaaatataaccattaattgactaaccactgatattgtttccttaaccctctgtttgattcactatatcagtgatttgtgttaaattttttaaaaaattgatgtggatctacattttcttacactactttaattcaaatatttattcacactttcatttctttcctttccattctactctagcaaacaatacctaaaagaaatctattgaaaattattttatttttatagtaaattttttacataattttaaaattatgtaaaacttctcttttaatatttatataaactatataaaaaaatgatcccactttaatgatttctatatttcaagagttaattttatgacttccaacaatataattatcgtgtctctaaaaaatatataaaataatttggtgcccctttaaaaatgtgatcttgggcgatcggtcacctagactatttataaataattcacacaatagcctccctatacctatatatataagtcataccattgaacagagtgtttctcccatttcccaccaaattcttcatgttttttcataaaccaatgcttgctcccccaaaacttatctacctccaaagaatttatatttgcccaccactttaatccccttatcctcacccttacatcatccctcaaggctttgcatacattcaactataggctgttttggtgaatgtacatgaagaagagaaaattaaaccgaaatttttataggtccagcgagtcttgtattaaaaacccaaccgaactattataggtttagtgaaccagttctatattaaaaacattgaaccaggcttataccagtgagacataaaaatactcaggcacaacataagcaaacagagaaaaagatgaacttttgtactctatttcattcccagatggttcagagagggtggctttttagttggatatatattattagcataaaaatagtattaaaaattgggggaaaagatcacaatgagtgacagagcaagaccaaaggttttggaaacaaaaattgaagatgaatcagagaagggttgttgtgacgaagaaatgcagaatgcgtttagttcataatgtacatgctattattctcaacacaaaccaaaactaatgtcagtcttaacatacagaaagtaaaaataaaaaaataaaaatgcttgacatgccaaatttcaatacaaggaaattagggatacaaaggcaaaactgaatcaactaagacgaacgaagaaaaaatagaacattggaatcggtgattgaaaagtttccgtttaagagaaacaaaagttgaaggataacgataaagatgttggggcttaccattagaatagaatgcgccttggtttgcgaaaatgagggggggagggaagaattggcactggatttggggttccgagtgctagtgcagagacatctcgtggttaccttattgtgctcatggagagagaaaaaggattagggttttgcatcagtgaaagggatggacactcacgggaataagggattatggccttgtgggattttgcatctcgtggttaccttactggtagggttcagttgggcttcagtgaaaaatgaaaatttcagatggaacttaatccgtgggaattcatccgtcaaaaacacacatgtttcttgtattgaaatcagtgaattatttataagaatacaactatttatttatgaagatatatattgagcagtgagcacctttatagttctcacctttatacgtataagtgtaaagttacaagctcatatacaatttacaatactacgtaaatactgcaaaactcgcatcagttgatttgatgcaccagaaccttgcgacgagatgacaacatttcgtttaattgtgcaatctgaaataagagttggctaatcttctgcacaaattaacaaagtgtatattcaggataatgatattcaatttaaacacctcatttttcaaatgagaccagattatgcaataaattaaatgtacaactaaaagtactaggcttaacgtacaactgtctacaacaactatattttatataaagaacattaagataaattagaaatgaagatatcagtgtatcaatgaagatggacacacctcttaaacaaaaaaataaataaaaagaaaaacacttagtaaattagagcaatatcttgtgctagttgactttagatttagatacatttaattttatcaaatttttattagaattaacttaagggtaagactactaaaactcaacctttaaactaattaacaaaaatattacttattattaatttttaaaaggcaaccaatatatttttgcactaaattgaatttatttatttctttatctaatttaggctggttgaattaatgtttttttaatttattgtaatagatagcctatttgcccgcttttttttatcttcctctttttcttaaacacgtcaataaatgtaataagagaaatataagtgacattttctctaacattttattttcaacactcttaataatttgactaaaaaaaatttattgaaaattatttcagtggatacatatacataattattttttttctttttaagaaaatatcgtatacgataactgtgtatttttacaaccatgtcttaaaatttagcatagtataatttttgttatactatatagaaattaagctcttacatttaataataaaaatatcaccctatttttactaactcactccataataaacctagttttacttccaaacttcaataatgcatattacaaaaactttctaaagtggtagtcatgcagaaatagcaaagaatgttgtacattgagtattttcatgtgggaatattctcatactcatgcactttctatgatagtattattttcatgtacttacctcatctttttctttaagaagataaactcattctattacctaggattttttgaagctgtttgtgaaatttaccgacggaagtttcagtgagggacaaggagtcgtttgtaaaccgtccgtttagagtgggtgtttactattatagtttgattcattgtaataacaaaattcttgtaatgtgtgcaactaatagaaatatgaaatttctttatatactcacctcatctttctctttaagaagatgaacccaaggatccaccaccacgttccgccgaccaaccctcctccgccgccgtctaatcgccacgtaaacaagcgacaccaacaccgacgcagccgccgcagctccggcaacctgcgtaaatgaccaaaacgcccccgcacacattgcccaattaccaaccttagaagccaccccaacaacgcgctctctcacaccctccaacctcaccttcaacaccttcttggcttcgctagccaccctcaccctccaatctaacggcgccgtctcaccctccgaactcgacgccgttaacggcgacgaagttccgtcttccgggtccgttaccgttgtaggaacgatttgcaacaatgagagttcgttagtagaagaagcttggtcaccaacaaggtagttttcgttgatcactaccatgttccattcggaaagttcgggggattgttcgatttgttgccactcgttaatgttctctttgttttccattatgttcggagtttttgcgtggagctaaggggttacttagaggtttgccggcttaaataaatatttttaggctttataatttagttttttttttccttatatttctttcagttattacaaaatatgattggtttattattattttcaaaatattttagatgctattttttactgtttaaaacattatcaaaagcacttaaaaaaacaaaataaatatattttaaattattaaaatgattttttttgcaaaaataaaaatgaaaaacattaaatttaagagagcaaaaatattaaaaccggttttacatgtcttaatcttactagagaaatatctatgtaggaaagtggaaaatatcttgggttttgtgtttttcctattatcggggtggtttgggataaataaataaattggtgccttatgtttagaggatatggtgggccagggctttatcggattcttctgaaactatccttcattatcagtacaagtggagatgtactttttcatatggtataatttgatggataattggaaaatgctcttgttgggagagagattttgactttttcaatatgtaaatgagaagagcaggttgacggacaatgagaatagccttagaggtgtttgaacaaagtattttaaaattttagaaaatttataatttagagaaattaaaatgtattaattaaaatttttgaattttttaaattttttattaagataaagcaatttaactttcttcatcatcgtgttccttaccaactctaattttgttgttcatcttcataaaacacaaacacatcacctagcaccaattcaaccctttgtttgcggtggtctccctcactacttcctccgtcagcaacaagtctagcttgtcgcgacaagtgttggccaccaaggtccctccgtgaccgtcgtaaaccgcaaaaaaatcataactgtcacagtgatgttccgttgccaacaaattgggaaccaccttcactgcatcctccatcacgcaccacccccttattatggatatgaaaccgtgtgatgcgacggcagcctttgtaacaccccgtgtgcacccagtgtgttaacatgattataatatcagaaagcataaaatacgctgcggaagcatacaagaatcgcatttcttgatacattatgtatggtacagtaacatcaacacaaatacaactcaattgtctttacatctagcccttattgatccagataatcaaaatcaaaacaaacaatcaaatacaggcagatatcagacatatcaatatagatatggcaggagacagaagctacctcaatatgtatgtatcacaaggagccccaatctcttagcctttagtcaataaactcctagtgctccactctggtgtgattctcaccattgagtccatcactaccttatcagttatccctgcaacataagtcccacgaggggtgagataaaaatctcagtaagcccagggttcttggaggtctttcctccccctggtgcactatcaaacatctttctcatactacatattattcacacctaacaaggcctgtgccctcaacctctgcattgagagatcatctgtctagtaaatagactctctcaagctccatgagcttaagtctcatctcatatcataactatcagccatctcggctttctcatctcatatttatatgtatttgttatatctgtaacacatatcnnnnnnnnnnnnnnnnnnnnnnnnnnnnnnnnnnnnnnnnnnnnnnnnnnnnnnnnnnnnnnnnnnnnnnnnnnnnnnnnnnnnnnnnnnnnnnnnnnnnnnnnnnnnnnnnnnnnnnnnnnnnnnnnnnnnnnnnnnnnnnnnnnnnnnnnnnnnnnnnnnnnnnnnnnnnnnnnnnnnnnnnnnnnnnnnnnnnnnnnnnnnnnnnnnnnnnnnnnnnnnnnnnnnnnnnnnnnnnnnnnnnnnnnnnnnnnnnnnnnnnnnnnnnnnnnnnnnnnnnnnnnnnnnnnnnnnnnnnnnnnnnnnnnnnnnnnnnnnnnnnnnnnnnnnnnnnnnnnnnnnnnnnnnnnnnnnnnnnnnnnnnnnnnnnnnnnnnnnnnnnnnnnnnnnnnnnnnnnnnnnnnnnnnnnnnnnnnnnnnnnnnnnnnnnnnnnnnnnnnnnnnnnnnnnnnnnnnnnnnnnnnnnnnnnnnnnnnnnnnnnnnnnnnnnnnnnnnnnnnnnnnnnnnnnnnnnnnnnnnnnnnnnnnnnnnnnnnnnnnnnnnnnnnnnnnnnnnnnnnnnnnnnnnnnnnnnnnnnnnnnnnnnnnnnnnnnnnnnnnnnnnnnnnnnnnnnnnnnnnnnnnnnnnnnnnnnnnnnnnnnnnnnnnnnnnnnnnnnnnnnnnnnnnnnnnnnnnnnnnnnnnnnnnnnnnnnnnnnnnnnnnnnnnnnnnnnnnnnnnnnnnnnnnnnnnnnnnnnnnnnnnnnnnnnnnnnnnnnnnnnnnnnnnnnnnnnnnnnnnnnnnnnnnnnnnnnnnnnnnnnnnnnnnnnnnnnnnnnnnnnnnnnnnnnnnnnnnnnnnnnnnnnnnnnnnnnnnnnnnnnnnnnnnnnnnnnnnnnnnnnnnnnnnnnnnnnnnnnnnnnnnnnnnnnnnnnnnnnnnnnnnnnnnnnnnnnnnnnnnnnnnnnnnnnnnnnnnnnnnnnnnnnnnnnnnnnnnnnnnnnnnnnnnnnnnnnnnnnnnnnnnnnnnnnnnnnnnnnnnnnnnnnnnnnnnnnnnnnnnnnnnnnnnnnnnnnnnnnnnnnnnnnnnnnnnnncaaataccaagcatggccaaatcaagcatattaatacatattcaccgtttatttggccttatgaatgacttttgtaaaggcatttaagttaattcaagccataacatagctctttcacacacacttctctcgtcccagagccaaactcaaacttcatcacaatctcagattcaacatgccatatggctcagaacaacctcctgactacatctccctaaagaacctaagcctaattccagccctatcaccatttggttactattcaccccattacccaaatcaccaattaaacggtgaaagctgagtttcttacctcaaaactgttgaagaaggccggagaatcccttctcctagccccaacatccaagaaacgccttcttctcttcttaagctcagctctctctctgaagaatctcggaattggggtttctctcaaatcttggctggaacttagctctcacaaggttctctcatgtttattagtgatttggaggtgtttggatgaggtgtgatgaagttatggagcttcccatgcccatcaatggctgcctgggccagaggaagaaggagaaaggggttttccccaaaaaaacgcatagaatggccttttataggcctctcccgcgcctcccacgcctccagcgtggcctcccacgctcctggcatggctttccagcaaaaatccactttctggagcagttcccacgctcctggcgtggcttcccacgcctccagcgtggagctacagtactgctacagtaactttttttttttttttacccacggttattatagccttggtgcagctgttgtcatcttctgtggtgagaaccacagcgagtgcggtgcgagagtgcaagtgagaggtttgacagcaagagattgcggttgcggtgtgatgtgaggttgcgagcaagaggttgaggtctatagaagaagaaaattttaatttcttaccttttagaagaaaattaaaatttcacattttagttgtttaaaattctaaaaatttaaattcttcatatataaacatccaaacaataaattttatattaaagaatttaaattcttggataagttactttcattagttaaaattctttattcaaacacattcttaatgaattgataaagaattctttcatgttattttattttacacaaaaggaaaagcagtactcttcctagttggaagttggaaggtatgggcttctatgaatatttgtagggtaacttaaatagctacaaaaaatgtttggagcaacaagtgtctccactaacctgccttttttatagcattggttgaatcatcaatgaagtttataggcacacatcaagatgataaataacattactgcattttctgtagcataaggtggtagttacaggaaaaagttttgagccctggagacatatatcacttgtgggaagggcctaaccatattatttagtgcccatatagattaatttcgtacccaaagtgtgtggagacaccttgggaaatcaacaaggaaaaataaatttcaaataaattgaatatttattagcagtcccatgaataggccaacacatggaattcttgaatcttgattctaccagggagaattttgattttggatatactgacaagtaataaccactattccaatgtagaaagctagatataaaaccaatataaagcgcccactattccaatatagaaagtttaaacatttggtttgggttagtttttaacatatcaaagcctttatggcaaaattatattaaaatccttcccacacttattcttcaggtgtttctgaaattagcgcttcctgctatggagttcctttactccatttaacatagttgaagaggagaaacctaaacaagttgcatatgaatatccagggtcggtgattctataatattttgcttaagttaaggataattatgatgaggttagattctatagaaattttgaagaagaaaatatggacattagatgatcatgagaacattcagcacaggaatgaaggtaactttccatagtctttattatgtcttgccatgctctatggttcactgtgttggaatagacatagtaatagaggtgcatcctttggattagttgtgtgatgaaacaagacatagatacacacatttgactaagcaattgatgttaggttcaatcaaagataaaatggaaatcgtccaaaagataatttgaatttatacttcctatagatgtgtcattattcaggaaatgcttgtggctatggttgacttgtgtaagtaattatataatcttaattttaggcaatgatcaatttctttagattgactctgtaatctgacaatgttaatgtcattttgttcatcagaatgtgagactcactgatgctctgcccatgttatgtagtttataaatgtacatagatcgaaacttacctgagaaaatataattaaataagacttaatggaatgagatacagattggcggaaagtatgtcttaggacagaatggagaaaaactataaacttggtagatggttagactcattattatctttatgttctagatgatccctttttagttcctttcctcttcattttttcccttcttctttcacccttcttttcttttatcttatttttcttttcttttgtcttatttctcctttttcttagcatttttttaactctctcgtatctatcattggatttatctaccaccgacccaaattaatttgggttaaaggtgctgttgatgttgatgatgatgtgcacaattcaatgatattttctatagtgctcactcatgcacatcccattgctgttccagaacgggttcttgccttaatcctgtgagtttcctgtaattaggttcatgtgaacatgttgaaaaccttggtgtttttattggatatatgataggtcagtaagttatgctagtaattagttatgttagtcaaagaaatacagagttatgttaaaaagaaggagaaagagcctgcaacttattaggcacattaagggtgggtttatgttagtagaccggtaactgtctatacgtaagaagaggagttaagaagagtcagttattataggtgacattgaattggaattatagagggaatttttgtagagttaaacacaataaataaagaagttatgttttttttctctttgtctgatccagtttctatcaatatatttctctttgaattgaaagtacatgcagtaaaagtgaataaactataaacagtctagtttttattggatgcctgtagcttgaattacaattacatatcaactgaaaacagtatagcacataaaattacatgaaagaaaagcataccattgctgtaaacaaacttcccacagaaagtgaaaccagtgacttcaattttgagtttctttaagggcattctaaagacagattacacttcatccttttatagtgtcacaaacacaagaaacctaaatctcaaggaaaatggaatattgaagctgataatgtattactaagtttccccatcaaataggtcaggaagtgggaatgctgctgttccgtacttgaacatacgctcctgtttgacttgattaatcttttcatggtcatcttttgtgagtgaccaatcaaatatctctaaattttcctttaatctctctttattgtagctctttggtatgaaagtcacaccttgctcaaataaccatctaagacatacctattgcatcacaaagggttgattgtattagcatccaagtagctgccaaagtaaactaagtgcagtgacaattatgatttatgaggtttgaatacgtgatttgggatgtattaggagaacttatttacatcttatttagacttatcttatattcttatgacataaatactcgggtaagtattccaaagagcttatgaaaatatcttaagatctgtccataaattgtgtttagcttattttaataagttctccaagataacttatgaaaacagtttacagctatttgaaaacagttaagtcttgttttttcaaaattatacttaaaagcttatatgataataaacacttattcaacaagtgcttagttaagcaatttacccaaattttagtgcagcttgttaaacaatttattgttaacttcactgttggtgactcaattttgctagtgtaattgtcattgagctttaaaaacacaaataaatctgaaaaatggtaacctgagctgcagttttgccatgagtctgtgcaatctgcttggtcaattcattgtccaaaacttgattgatatcccatttggtccctttggctcccaaaggagagtaggcagtcacaattataccctttgctttgcagtattctctaagattcttttgctgccaggcaatattcatctccacctgtttggggtggaaaataagatgtgtgaaataaacaaaatgtgcaggatagatgatagatgatggacttacttgattgacagaaggaggaattgtagcaaaagagagcagattttcaagtttcttgcaagagaagttgctaactccaattgatttcgtaaggccaagtttgtgacattcttccattgctgcccacacaccctttaagtcaaatggaacaaggctctcttcagaataaggcatatcccgcattccaggctttgcagtaattggccaatggattaaataaaggtccaaataatctaatttaagagacctgcatcaatttaggttctgacaaaacttaaatacagtttttcaagtgtttttcatattgttctccaattagaattagagtttcactttgagaacttatcttgacctttaatggaaatttttataataggattattgaagtgcaactctaattctaattggagaacatagtcaaaagcatttaaggaattggagaatataaaaaaatattgccttaaacactgcttctaagttttatctggcttatcccatcagggtcatagactagtaaatgaacactgatacatggacacctaatcacttcacaaggagtgttagcaatacactctctaacacactctttctaacatatactcacaaaaatttgtgatttcaataaactttaaccaattcaaagtgtgtgttgctagcatttcaaataatccaaatacctctttaacacctatcatttcttccattctctttctccttatcttgtcatatgacctattctatttagcatttctctctctctctctctctctctctctctctctctcttcatatctctaggtaactagaatgtggtgttaaccaattattttccttagtaaattacactactagaataaaccatcaatttggtccctgaagtatcatcatctctcttaaatagtccttaaactaacgaaatttataaaatagtctttaaaatattagaaatcatgctacaacatccctcaagcatagaccttgtttcaatttggtctcttaaagttagtaaaatatattaacttgcaacaaaattgatagatattcaatcatttagaactacctaattccttcgttcctatatatatataatccatttacctaattcatcaagattatgaaaaatggttaatttagttaataacaatgaatttatcttaaatttatttctaaaactattattcattaatatttttatctctnnnnnnnnnnggacacctaatcacttcacaaggagtgttagcaatacactctctaacacactctttctaacatatactcacaaaaatttgtgatttcaataaactttaaccaattcaaagtgtgtgttgctagcatttcaaataatccaaatacctctttaacacctatcatttcttccattctctttctccttatcttgtcatatgacctattctatttagcatttctctctctctctctctctctctctctctctctctcttcatatctctaggtaactagaatgtggtgttaaccaattattttccttagtaaattacactactagaataaaccatcaatttggtccctgaagtatcatcatctctcttaaatagtccttaaactaacgaaatttataaaatagtctttaaaatattagaaatcatgctacaacatccctcaagcatagaccttgtttcaatttggtctcttaaagttagtaaaatatattaacttgcaacaaaattgatagatattcaatcatttagaactacctaattccttcgttcctatatatatataatccatttacctaattcatcaagattatgaaaaatggttaatttagttaataacaatgaatttatcttaaatttatttctaaaactattattcattaatatttttatctcttctttgtcaatatttttaatataaaaataattatataagaaacattatagattgcgtcttataaaaagaaacaagcagcctttcaaacttattcttataaataggaataaagggtgtatacaatttcataaatataaggacaatttaggagaaacggtgatacttgatggactaaatacatggtttattcctaagtctatataacttggagatgccaaacaaacaaacaaaaaagtaggggtttcattaattccttactgaagcgaattttgtagagcagggagaacaagatggggatgattatcacaacaccataacttggaagtgatgaaaagttcgtctcttgagactatgagaccaacacgaagtgcttcagcaatggcttctccaagagcctgctccgatccgtactgtgccgctgtgtcgaagtgtctgtaaccgagtttgatagcctctatgactgcagccttcaccgtgtcgctgtcgttgtggtccgcggcggtgccgagtcctatcaccggcatgctgagtgggttcgatttggagggtggttgttgttgttgtaacagcactttggggacgtttgttgcagacatgatacgatgttgcgatgtgtcgcgggtcttcttttgcttatgtttgtatttctgtttacttcctgtggttggaggtgggggagttgggaaggtacggaagagacccgataaatcagatttcaggatccgaattgaacacggtgtcataggagtgttccggatttggtttggttttattctttatcgaaaaatcattctaatcaaattttaaaaaaatatatccaatttgatttggtttgctttttatttcaaataaaaataaaaacatatgcggatcggtttcaaaaatactaaatgtaaacagacctgaaccaattagtttgagaaaaaaaatttccagacaaaaaattcaaaaagaatcaacttgacttagttttcagttttttataggaattttttatttttattttgaatcatttgaatttgaacacttataataaccatgaaaataaaaataaataaatttactattttcgtcacaaaaagcattagcgacagattaacgacagattttgcgacggatttagcgacggccagagagtggcgccattagcgtgagaggtgcgccagagtgacgcggttagcgtggagacgctccagaggccattttagtatggagcgaatagcgccatagatgcgggaaaatggcgcgattagcgccatagtggcgcggttagcaccataagtgctcagaaggcttgttgttacgtgaatttggtgcgaatagcgccagatttggcgcggttagcgcgagacctctgacaggaccactataaaagggtcatttttgtgtttttggcccaaaaccttccttttcttcttcctctagctgtgctcctccattgttgaagcttccaaacttcatacaccttcattctttcaccaaaacacttccctccaaacataaaacttgtagggaagcacctcgtgagctagaatccttcatcactttttcgaaaaaatcatcaaacggagagatcgaaatctctaaggagctttccaaaactcaagctcggcgaggaaaggaagcgattcttggacacccaagcttaaggaagtggtcccctagtcttccttgtcgtcttagaggtaagaaactcgagttttaccgtttgatttgtgattttgcttttgcgatgaatagtgacccatttgagctagagctggaattaggcttgggtcctttagaaaagtatgtttagaatgttgttgtgatgaaggattagctttcaaatgttaatttcatggactttgattcttggctctgagaaatgcatgtgtagctagtatgttggtttagtgatgattatagaacatgcatgagccttgatgcttgctctatgtgtctgagaggctatatgaacagtgtaacaccctgaaatttcaataactgcaaatatatgttttatgaattattcttgatgtaaatattagattatgagaaatttggctggtctgtatttgaattaattgggtgaaatatcaattagagacattaaggaaatgtttgaagagaaatgaccatattaccctttccttaaatcagaaattacataaatgcccttggatattttggaaatgacaagaatacccttagatattttggctagatattttatggtggaaatgacaattatgccctaggatgaatgatgaaattaccataatgccctttaggtcataaatgaccagatatccttagagattttgtgagaacctgatgaaattacagaatactcttgactggcagaatatcaaaatagtttgtgacaagaaactctagaatagaatttctatgaattttataagatagtgactttgaaattgtattcagaagacttcaggcatcagaaaaatatggaaaaatgagaagtagaatctgtggatttttctctcaattataggatatatagattggtctaataaaatggtttagtaattttgatggtcagaaatagaatggaccaatcaagattaagataaggacactcttgtacttgagatctgtatagcactctgtagagattggtcatgagttatttgtaatgtaactgaagatagtttttggaaatctctgaaattctattatttcacattatctttaggtagaagagttcaaatcaaacttgaattttttttttagaaaataccatgtataaagtcatattggaaccagatttttcttcatcatcaaaaatgactcatgtagccttcaaggaagtaaaatttgttttcctttccacttaagcttgaagtccacgtgaagaaggatgtagaatgggcaataaaattcatgaattagtcacttgtaaagatcataacaagtaaagagacacttggaagaagtcataatacatgtacacaagatgagaagaaaaatcttctcttgtctcctttggtagaacacgtagacagctctagacattatttcaacaatccctacggtcaaaagttacatatgtgggatagtaatatacctttaaacttttaaggagatccaacggttaacgaatccagaattagtattttactaaaacaggttttgtgataaaaagtggagaagttccaagacatgccaactaagtgggacacttgtcttccttccccttaagctagatgatcacgtgatgaagggtgtagaagaaagtagaatcttcatgataagccacttggaaaggcaagccacatgaaggaaacaagtggaatggcacttgtatggtgcaaaataaagcttgaaagatttttcttataaagtaaagaagtcatcattaacttaattagaattcaatggaacaagaggtaatttagttagaatgtaactaaatgaaggtaatttagttaggaagggaaaaaatgtccatgaatattaaatcattttccaaatgctatataaaggggggaggggggacctaaatgcaagtcattctccaagctttcctctctacactctcacgtgaactctctccctctcaacaccctcatcctttcatttttaaagtctaaatcaagtaaggaaagaaccacaccatagtgaagaatcacgtggaagctaggaagcctttaggaggaagtttgtcaaagctttataggaagagaaaaacaagcttcataaatgattataaggtacgtatggggaagctttatgataaagatagtttaagtgttgtttgtgtttgaataattgtttgaagttcaaatgttgttgagtatttctatgaatttctatgaaatccatgtgttgctgagtgtttctataaatctctgtacatgaatgatacgttgagtttctgcacatgacaagctgagttctgtgcttgattgatgttgaatttctgagtaaaacacatgagacagtaattgaaaagtaatattgaaatgatatgataaaataaatgaattagtttcatatgtctcatacacatatgcccggcgggggttagtccgcgttatttgcctcaagaggaggtgtgtcagatagctaaactgagtccgtgcgttcagacaaaaggagtctgagctggggagtgattggcagtgaggaccacgccacccatgatgatcacatgaagtgtgggtgaccttcctattgcaatactgcagtaccctgactgatcggataagttctgtgccagtgattggggctatcttgactatggtaccaatgataaaaatttgagagaatcatgcatcatgataaagaagaatcatgcatcttgagattattgttatttgcatattgaatatatattgttgcttaaattatatttatcataaacttaccctgtactttgtgtctgtggttgacacctgccatgacctcgattttattcgagcgagcagatgaacagagattattagctgtatacatgaagaagattctgttgattgaagatatgaagatgaatttctgtacaaagtatttagttatttgtactatgtaaaaataattaacaacagtctgtattttattgaacattggactttcaagtatttctcaatgaagaaaatcttttgtactcttattatatgattttgaaaattttgaatattactcagtagcggaaattttgaattgatatttttaaataagttgaaaaagaattttcactaaaaagcaataaaatacaagatgataaatcgaggcattacaaacagctacattatgtgaaagaaaccgttcaaaccacgttgtggattcttgagtattggcctgtatagagctttgagcactttgttttagcttgtaccgagtcttgtggagactctagtgccttggctaggccgagatagaccactgaggatctatgttttgtctagtgatttgattaagtttgataaccttaaggtagatgactcagagggttttgccttgtatggttgaatgggttttgatttgagcttgttatgccttgtatagggcgtgacaccgcgggtgtcagtggcgtagaccaccattctgggattgaaccgcagagcacggctttgccaggtacgttcttggtttcttgggagtgtttcccaccgctgtgttccaccaaactccaagggagtgatggttgcattcatgatgcatgcattgaattggttgttactttctcataatgttatgtatgcatgattctatgccttgtatgtatggatacctgtgattagatcttctggccagttagatagatatggacctccctaggagaagagcgcacctcctagtttggtttgctcacgtcaagggtgatgatgatcccttaagaccaagagataggtggtcccgtcgtggttgaagcctattctcggaggtgccatatatgtgcatccatgcgtaaggggtagctcccgatgggatggcacgggtgtgagttccggtctcacactgaggactaagagtcttgatgctgatgatgatgcatcgtggcggcgtagttccgcagatatacattagagctagatgattggctatgtattgttatgagggccgggtggccattgattgtgatgccttgatgacgtgtgtcatggaagtgagccagggtggaggagatgcctccaaggaccctgagcttactgagatgtttatctcaccccgtgtggggattgtgttttacaggagactcatctggcagagatgacggttcccagggcagaaggtcccagtagggacagttgttgcagcactttgagagcatggaggctccttgttttgctttgttgatgtttttatacccctgtgagggaagatgtgtgtgtgcacacatgttttggattgtttaagtacatggattatatattttgtatgccctcgtgtgaggaagtgatcttggtgatcaaagcactgggatgcttattcttttgtatagacactgtgagtgttagttgatgtatatgtgtatatgtacctttgttacctcctgatatatctgtagagatattggttatgcatctgccgtggtttatttatgttgttttggatcatgaggctggaatatgtttatgatgagtacttaacgcaaaccatacataatgaatcaagaaatacggttttattatcgcttccgcggacctttttaattaaagtaattatgcgcttatctgattaagtaatatgttaatacaccggatgcatacggggtgttacaacacccctaatcatagagtttactcaaatgctttattcaatcaactgaactagacattgataaaaaaacaataaaatgagtttggatctataacctatggtccaaacaaacaaaaaaaaatcaagtttagaaaataaataaataaaaaataaataagaaccatttattctctcattattgtactaaataaggatgaaaatgagtcagaccgtctatgaggggccttcggcttgacctgtttaaggcctgacttggcctgacatgtttattaaaaatgtcaggttaagacttttaaaaacgcttatgaaacttacgatattttatttaacttatttattttgtttataatattttgttgaatacttaaagtgctctaattaattttaacttatttttttcatgcacaagttaaaagggaaatatttatctttatttatattaaaattttaaaaagtactatacgaattttcaaaatttcactagtcattaaattttttttatatataattttattgtaaaataggctttttaacaggctcgtaagccaaacaaggcttttaaccaagcctaaaaaaaagtctatgacaggtaaatagaccagggcaaactttatgtttttaaatcaaacaaagaccaggcctaacaaagcctggcctggtctggcctatttccacccctaatgttaaggatataccacctttatcgatgattgatgcctattcaattacgttacccataagatttgaattcgatatttaaatttgagacctttcctaaagagatcaattctaatatcatttgcaccaacaaatgacttatttgtaaataagagtatcttcaatgacaaatttattctaaagatcttaaatcacttttttaagtctcacatgtcacattagtttttaagaattctagtaatctttattccaatgataatctcattaagaacttgactagggtcccacatgttatcccatatatttctaattatatattttatattttttctttaaaatataattcaattgtatttttacttttaaataatgaatataaaaaaattcttaaagtataattaattgttctgaaaaatacataacaataaattgaaaatgaggaaaattacacaacaataaatatttaaaatgaattttatcatgtgtgctctttttatttttaaaatttcaattttttttctttaaatttttcttaggcttaattatataattggtcccttaattattaaaatattcaatttgatccctcaattatttaaagcactacaattgggtctctcaactatttgaaagttcaattagatcctttaattatttaaaacattacaattaggtcattttctataataaaatataggctaaaatataatttttatttccctattttctcaaattcatgattttaattctcttttttttaaccgagacattttattctcattttttaaaagtatgtgattttagtcgtcatttttaattaaaatattttattttctactttaaaaaatacataattttagttcttgagaccaatttcgaacgttgatctaagtattctataaacattgaataacatgtgtctatttattatctaaatgataattatttaaattatttaattattaataagcataatttnctaaaatataatttgtttccctattttctcaaatccatgattttagttctctattttttaattgagacattttattctcattttttaaaagtatgtgattttagtagtcatttttaattaaaatattttattttctactttagaaaatacttaattttagttcttgagaccaattttgaacgttgatctaagtattttataaacactgaataacatgtgtctatttattatctaaatgataattattttaaattatttaattattaataagcataatttattaaaaaaagaattaaaatacatagttaagtctcaaattgacaaaagagactaaaatcaaagatttttttaaaagtgtgggatataaagtctcaattaaaaaaataaggaaactaaaattttggattttttaaaagtgagaaacaaaatatctcaactaaaaaataaaatgactaaaattacaaatttgcaaaaatatggagacaaaatttatattttagcctaaaatacataaattttaattgaatgttttaataatttatgagtctaattgaactttttaaaaaataattaaaaatctgattaaattttttaagaattaaaagattcaattgaactttttaaaataattaaaaaatcttattaaagattttaatagcttttttttttttttactttagcaaaggggacaaaactgaaacccaacaccgtagatgtcctctctctcagaatactcgtctccctcaaaattctcaaccatggcgttatggttgtgctccctctttagcatttcattgggtttttgaaaagaaaaaaatattattcagaacgaacgcgttcgttcgagctggcaatctcatgccgcactccaacggcaatccacagaggatgtgttcgtccttcgtaatagccttgttccgtatatttccagaacacaaatgtacaacactgatgtgctgaatgtttgctgttggatcaatcctaactctgcaacctcaagggtatcaatggagaatgacaccttgaagtagacgatcacacagaaataccacaatggacgtggggtgtgtgctctgtgtaattgaaagagatagagtcagaatgaatgtgtacctttttggcaacaattaccatgtatttataagcataataccttgcagttgtgacacgaactgcttccgagaatctcggcctccataagcatatctcaactgctgggattgactcagttatagcccacgttcactaaggagtgtgatacaggatgaagataattgggccttgctattaagcccaattgtcactaccacaacagtagccccccagcctggttgtcaagtaatcttggcagccggggtgccgtatatttttgcccggcttagaatagtaatcggatccggctatctgacgatgatggttgccggtaacaccctaaatctgtggtccgaccactttaattttgtcctccgggtatatggagctcttcaagtccgggtactcaatgactgtaatgtccgggtacgatgttatcctagcgattaaactatcattatacccgaatccgaccatccttcctcgggctggtgaatcgccgttcctagtagacttgaagtttcctttgtactccaactgttgattttccatcaatcatcttgaggtctgttactattcctgccattaatgcaataaagtgcctgtcgcttcgttctcttattaatcattactaccttggtgatttacctactttgcccatatttgtatatggtgttttaccatcatacccctcgcgtcatttcagaacttgccaactgtccttcgagccgtttaatttcttttggcggttacttatttttctttatatttcaaattttttcctaaaatctcgctttctccccctacttatttcctgtgtcatttcattctttcatcctttttgcatttactctgcattttctgcatcttttcttcgcgttcttcctgcaatcctttcttcgttcgtctctaccaggtattttctttttctcctatcttctgtttttgtaaatcgctttctttcgttttactttctgcaatcatcttctattctaggcttctgttctaggcttatcttctgttctaggcttctcaccattttcaaactcaaaagacctttgacgtttcgactcgaaaccacactcttccttcttttattcctattttgtcattatcatgaaacttactcctgaagaggaggcgcatttgcgcaaaacggtgactcccaaagttgggtggtggctgtttggtttgcccctctccgatgaagaaatacaaaaggatctcctccgtggtcacactggaggttcctcatcttccaggaaaccaaaggtttccgcctcccatacaccgtcagttccgccggggctgcctctccggggcacttgcgggtctaaacccgcaccgagtgctcctccgcatgttatgggctccaatcaccctgggcccaaaactcaattgccccaaagccccccaaggaatccttcctctgggctttctcctcttcctttaaatccgcctaccaatgtctctccgtcctcctcggatgaggttgtcgaagtccgattcgatgcctgcatggactgcgtctcggaggccatgtactatataaacctcggctcggatgacatggccgagtccatattgggattgtaacaccccgtgtgcacccggcgtattaacattatacaatatcagagtaacgcagcatgcatggaaataaacagtaaaggaagcataatttcgtcttaatgtacagtactttatacatatatggtgaatcactgtcatatacaagccaattttctcaaaactatacaaatgacccctcagggtatcaaaatacaatcaaaataatcaaaatgggagcccacaagctccagtcatctagacctagggttgtcttcacactatcccagctcaggcctcttgccttgggatttctcagacactcctgtctctgttcctgcacatgagccccaaagaaggggtgagataatcatcccagtaaactcagggttctcagaggttttccctccccctggtttacttcacagcatattatagacatatacaaatatacatgattaacataacatgagcaaatcataataaacaactcaacaaaacataagaataggcattttaatcaattctcactttagctatgcctgattaggatcatccacctactcgtgggtacatctaatcaggactttccgtccactacctgaataggctcatccacctactcgtgggtacatctaatcaggacttacatggacgcctatggatttccctaagagagatcatccaccttctcgtgggtacgttcccagagggtccatagttcctcagtttactggccagtagatacaaacaatcaggtcataatcaaatcaagcatcatcaacatcttactcagtaagtcatacaatcatataccctatctcagggttaagttaacatatggttgccagcaacatctaattattccatacatgtccaacatcatcaacatcacaagacatctggcacatcattcagtgtcatatcaccacaaggcataagcatataaccatgtcaaacaagcacccaaaatgggtgaagcaaacacaagcaagagaaacaaactccaagaacactgagcttacctggtcgtagctcagaaacagctcccctaatatctgggtgatctctagcagaaatctgcacttcacgccctacagtaggcatgaattaaaccatcagaaacggtattcaaccgttttatatggaaggaaacaccttcccattcataactaattcaaaatcctctaacttaaggtttatcttagcccagcttctactaggctatacattgaccctcaatggtctgccttagtctcatcaaggcctcagagttcttttagaactctgtacagcttaattcaaagctgtaccagaatcaataaccgacaatggttcaactcaaccaaaacacatatataatcacgttttcaccgattatttggccttatgaataacttttgtaaaggcacttaagttaattcagaccacaacattgctcattcacacacacttctcccttcccagagccaaactcaaacttcatcacaatttcagtttcaacataccatatagctcagaacaacctcctgactacatctccctaaagaacctaagcctaattccaaccctatcatcaattggttactattcatccaatcccccattccaagaattaaacggttaaaacgcaagtttcttacctcaaatcagtcgaggaacgctggagaatcctttctcctgacgcttgcgtccttcaatcgctttctctttctctcaaagctcaaccctctctctcaaaacccaaggaatggggtttttcaccaactctcacaaattaggctgaaatttggcttataataggttctaatcaagtttagaggtgattatgaggggttttaatggattatgatgaagatatcaagcttctaaggtgctctaatggctgcctggctcaaggaggaagaggaatagtgattttttcccaaaaatcgcgtaaaatggccttttataggcctctgacgtacctcccacgcttccagcgtggcttcccacgctcctggcgtgggtttccagccaaaaatggctttctggaacactttccacgctccaggcgtggctccccacgcttcaggcgtgggctacagtaactgctacagtaattttttttttttttgaaactagggatattatagggatcatgtcggcacaaccccgtgcttgtccctattaccaaaaaatcgctgccgagcatgtgtactcggccagatgatgtcgggttccgacctcacacccctctacacctgctctgtgttcttcaggtatgctttactaatttttctcgtttttatttatataggtgtctatatggatactcctttggaaattatagatgagtcaatctctgccgaatctcaatcagaagttcctccggctttggcttctaagtttccgtgggttacctacgaagtcctgaacaccttctctactctcgatcttccttctatagtagctaccccagtgggccgacaggatgggtttgccatccgagctcccctatcgggtgaaccggtctatgccagccgggaagggaacgaccccaattttttcttcttctatcaagatgtgattatcaagctcggaatccggtttcctttctcttcctttgaaaccgaggttttgacacatcttcggatagctccttatcaacttcatcccaacagttggggctatgtcaagaccttcgagctgttttgcaaagacctaggggaaccttgcaccatccctttgctcttctattattattttccccaaactgggcggacgggtaaggaacctcccgaacgcaaaggatggatctctctccggagtcgaaccaagcgcaaacttttcattccctataccgattccttcaaaggcttcaaggacaagtatttcaaagttgttgccgaacctggacagcaaccgttcttccttcgtggccccgaatcgtccgacgtagagtgggcgtttcctctttactggtcgcaagatcactatcgtcaggaccgattgggttatcggtttactgaggaggaattgccggactttgatgcttcttccatattccggatatccgaatatttggatacctatgggtcgcctagcgtggtcgactattgatgtgttgcaaacacatcttatttttagaatagttttagcttatgttttgattaaataattaggatttagtttagtttttgttattttattaatattattttattttatcttaattcaatatcaattatgcaatttcaggtcaaaagaggagaataaaggccaaagaaagaagaaaacaagttctggagtaccaagtgggtcgcgccgctactcgcgcgactcgcgtggaaaaaccgagaataccacgcttgtagcgccattatcacgcgacacgcgccagtacattctgccaagccacgcgactcgcgtggtatcgcgcgcgggtcgcgtgaggatgctgtttccttatttaaattatatattttcagatttgatactatattaggattagttgccttaattaaaggattctataaatatatttagtttccttaattaagaagatttgattcagatttggaacaagaaaataggccttgttaccctaattagatttatctataaataaaggcctctaggaagcaacatatatctctcaccacacacacttacacctctctactcttcctttcttttctctaaacctttggaagtcaagaatcaaggcaaggtcaatcaagaatgtcttatgtgatagcttttggtgtcttgaagcctatggcaggctaaacttgtattgtgggaaggccatgaactgatgtaactcctccgtaacttgaattggtattgattctaatgctgttttgattattttattctactctgtgctattcaatgttttattcttatttggaattggccattctatttaagtattgagggttaggattcgcaatggacacgttggggttctaatttctgacatgtttagaataatagttgttcttcgcctagacatagggatgcgtggctacggactttataatatgttctttttcatgcttaacttaatagaattcaccaagacattgggtttttgaattaggtnnnnnnnnnnnnnnnnnnnnnnnnnnnnnnnnnnnnnnnnnnnnnnnnnnnnnnnnnnnnnnnnnnnnnnnnnnnnnnnnnnnnnnnnnnnnnnnnnnnntaggtttctcgatcaactaaagggtgaaatcgctagttaatgctcttaagagtctaggatttacgaatttaggaaagatttatcacgtgtgtgacttaagataataaaccaatcaagtgaaggaggtaggaacaaaggggattgtgtctgaccacaattgtttcttccattggtaacttctttatctttttacttactttaatttctgtttttattcaaacatcaaccacaactcaacaattacttctttgttctttatttttctgtttttaaattccaattatttagaattaatattattgtaaaaatcattccaatccctgtggagacgataactctacttacctacttttattacttgttaacgatcggtgcacttgccgtatcaagcgcgttaatcgcgcaacaactatcttcagggtttctgactcgacatgcatatgcattgtaatcccaattcctattaagttatttgacagctatgcgtagtataatcatgtgtaacttttttacctttttgtttcagctagcacaatgggaacgcagccgccttcacctgatgcatctgttaggccgcccaaacctatcgaaggccggggaaaagggttggcgcccgagaagcccccgtccaagcccgcaccgcccagggcttcaaaacgacctcctccttcctaccggattgctttggaaggggggaataaaaaggccaaggtggtgtcggagacgccaacagcccctcgggtgccgaccccttctgtcccgaacttgaccgccacaactgcagttcccgccgtggagccttctccgattccaccattgctgacatcttcaagctcccccgggctctctgaccctcgggctaaaaatctttggagaaagggcataactgaagacctggtcaagttgaccaaaatgccttcccgtctcctcgaggctcgtgttccttcggatgaagaaattgccgagcttgtgcgcattgaagagaacgcttttagatgcgcttcaatggttaaaggcttcgcaaactctgcgtgaaaggtgagtaactgcacacaacttattccgggtttgcgttttcatttgttgagtttttatccacttgtgttttaggtatgcggcctcggttgaggcacaggaaaaactggctgcggagaaccggcaactccgggagaacctcctcccgggatcccagaaattgaaggatgagttgctcgcaacgcggcagctgagagaagagctgctatcgtcccaggctaccttggcttcgttacgaagcgacctcaaggctctcttgaagctgccgagcagcaagttactctcctgacatcttctcttgattctgtgaaaactgcccacgaggagaagatccaggcctatgaagctcagctggcttcaatgaaggccacccttgctgctgctgtcgaggaggctttcaacaatgccgttgagcagattcaatgtttaaatccgggtgtggcactctccactaccgggatgcacttcatggcgtatgttgatgacggccacttggttcctcctgcaggggctgaggattcttccgtgccggctatcggggatcccgtacccggagaggaggcaacttccactgttccgactaccgacgctcccaccgacgatccgccacctgttgccaaagagtgaagggccgggatgccggtttagattgtattgctttttgttttattaatgttggactctgagcctgggacatatattctttcctttatactgttgcactttgaactcggaatcatgtttaaaccttctcaatgataattgattttttaatatccgagcttctcctacccagttgatttatattatacgcgcgtatctttggttccaacgaccgaatattatattcatattatttttaagacttagattttcacaatgaaaaaccccactgaaggttacccccttttaccgatttgatcagaaccggatagcgtatcattcaatgctctaaaatccagtcgaataattgtgtaacgtatcacgttttaaaagaaccatatgaatcatggtttatccggatccatactctacataaaacaccatgatatcgaataacattttattgaaactgatgccgtcgcattacaataagtttattttaaattgagaaccatatgttccgagttgaactatcattctcggctcatactctcaacaggaaataacaacacttagaactttgacctccgagttcataccctcgataaaagagaaacccaccagattcaaactaaccggtgtgatctcaatgacagagaaccatatgtacccggcaaaacaatctccgagttcatactctcaataaaagaaaaacccacaccttcccatgaaataataccggacattaactgtaatattttttaagcttgtccgcattccatgttcgtttaattacgtcgccttccagagtctctagcctgtatgccccctggccgagtttctgagctacccgatatggcccttcccaattaacggcaaattttccatcccgggcatttttattcccgatgtccgctcttcgtaataccaactcggtctactcgaactgacgtggtaccacttttttgttataggcccgtgctacctgtcgcttggctctaagatcccgggcatgagctgctatccaggcttcatctactagtactgattctatcgccagcgactcattattcgcgtcctcacctctgcgcaacacctgttcgcggcgccacgatggttgtccgacttccactggtatcatagcctcgcaaccgtacgtcatacggaacggtgtctcacctgttgatgtgtgaatggtcgtccgaattccccatatggcgtagtatagttgttctacccaatccgacccggcgtcgaacatcctttttcgcaacgcatccagaattgttttgttcgcggcctcggcctgtccgttggattggggttgttctactgaagcaaacttgtgtagaatgtggaacccggacatcatctgctggaaacccttgtcaataaattgagtgccgttgtcagtaatgacctctcccaggattccgaacctggcaacgatgttcctttcaaagaaccgctgaacctgcgccgaggtgattgaagctaatggcgctgcctcaatccatttagtgaaataatccaccgctactatcaaccacttaagctggccggttgccggcttgaatggtcccaacaagtccattccccatttgaaaaacggccaaggtgccgatatgcattgcaattcttccggtggggataatatccgcgccccgtatttctggcaactttcacatcttctgacatgtgttattgcatcggctcccatggtcggccaatagtatccggcccggagtgcctttcttgttaatgctctcgcccctatgtgttgtccgttaataccttcgtgtatttcggacaaaacatagtctacccggtccggcttcacacaaaccaacaaagggctgtgcaacccctttcgatacaactcgttactgataattgtatacatagccgctgtccatatcaattttcgggcttcaagcccgtcatccggtaatgcccccttttccaaataatcgactattggtctcctccaatcttgttctgttgtgaccatcattatgcaagacggctgttgcatttgttgttggaccacagttcggttatttccaggactcttggtactggctaattttgacaagatgtcggccctggtattatcttccctaggaatatgattaatctccacctcgtcaaattcagctatgacctcttttactcgacctacatattttgacaataggggcccctttacttgataacgaccatctatttgggccgccaccaactgtgaatctgtgaacaccttcacccttccggcttcctgttccttcgcctgtgttaacctggcaattaatgcttcgtactcggcctgattattcaatgttggaaaactgagctgcaatgagaactctgtagctaccccatccgggttctcaattatgatcccggcaccgcttcctttcttgttagatgagccgtccacgtataacttccaccagtctcctgaccccgaggagtgaggagtaagctccctcacgaaatccgctaacgcttgggatttgatggcatgtcgggcttcaaatttgaaatcgaactcggacaattgaactgcccaattagtcatccttcctgctaagtctagcttgtgaagcacctgtcggattggttgattcgtccttataacaatggtgtggctctgaaaatatggtcgtaacttcttggcggctatgatcagtgcaaatgccaacttctctagtttctggtatcgcaactaggagtcgcgcaaagcccggcttacaaaatatattggcttctgggctgcgtcgacctcccttaccaacacggcgctaacagcctcctcgcctactgataaatacaggatcaacacttctcctggttccggctttgacaaaacaggggggatgctaaggactttttcatctcggcgaacgcggtttcacattccatgttccactgaattacggcttgtttcttcaacatcttgaaaaagggaaaagctttttctgccgcttttggcatgaaacgtgtcaacgccgctaaccttccagttaattgttgtatctccttcttgctttttgggaactgcatgtctagcactgcacggcacttatctgggttcacctctattcctctgtgcgtcagcataaatcccaagaacttcccggctccaacaccaaaggtacatttcagagggtttaggcggatattgtacttacgcaaccgcctaaacgtttcctccaaatcctcaacatgccagttaacctttgctgtcttgactatcatgtcgtctatatatacttcgatattgcggccaagttgtggttcgaacactctgttcatcattcgctgatatgtggcccctgcattcttcaacccaaacggcatcacgttatagcagtaattggccgtgtcgccgataaacgccattttctcctgatcctctggatgcatcgctatctggttatacccagaaaaggcgtccatgaatgacaataccttgaacccagaagaattatccactaactgatctatgttcggcatgggatacgcgtccttcgggcacatcttgttcaaatctgtataatccgtgcatactctccacttcccattcgatttacgaaccattaccacatttgatagccaggtggtatactgaatttcccgtatgaactcggcctgtaacaattccccaatatgagcctgcaatgcctgagttcgttctggtcccaacttccgcttcttctgttgtaccggcttcgatcccggatacatggataatctatgacaacaaaattcaggatctatcccgactatctcagatgccttccatgcgaacacatctcgattcttcttaagacactggataagcgcctccctttgtccggcttccattactcgtcctatgttggtaatttgaccaacttgatcacctaactggacgtggtccacttcttctacaggctccagcctccattcatctgatgcttctcgcatgtccaactcgaccatgttcactggtcatattcggccattgctgttgtttgcggtctcccaagttttgacatcgtctcgagatactggcaatgatttactttcgctttcccggactgtgtcgtaataacattgccgagaatccttttgatcgccacatatagtcactacctgaccgttgccacccacaaacttgagcttctgatgtttggtcgacatcaaaatgtcccatatgtgtatggtcggtcttcccaatatcatattatattgagaaggaaaatctgtcaccacgaacctcactctctccgacttgaaagcttcccttgtgcccaatgtcaaccgcagatgaatggctcctttaacatttgtattcccgccattgaaaccgatcaacattgttttgcatggtttcagatcttcgacgtccaagttcatctttttgaatgcgctccataagattatgtcggcagaacttccgttgtccacaaacattttccgaactcggcaattacccactgtgccggtaataacaagtccgtcctcatgtcccggcactactccctccatatcctgctgcgtaaagtacaacagtggatgttctttgtctccctttcgatctttaaactttggctgtgctctaattgataacacctccttcaggtatttcttcctctgattaacagtgtctccgccgcctcccatggctcccgagattacgttgcattcgaattcgggttccgggaatatgtcttcctcttcttgtaactttttcctttcgcccttcttctcgtgctggacgtcatcccccttgcgtttgttcttccgcccctgggttttgatcacatattgccttaaccttccttctcggataaacttttcaattgcatctcgtaaatcccaacactggtccgtggtgtgtccgggtccattatggaattcgcagaatcttgacttatctaacccggccttgttaaatatgggacgaggtcgttctaccttcttcatatcagttagggctacctctttccaaatctgagaacgggagacgttcaacggggtgtatatctcgtatttgttctcatacctgcccggtttgaagttcacttcattgttccgggctcgattctcgggatgtccctaattctttgggggcggactccttcttctagggctccgctccttctctcgccttgggttatttgcaatctccatctgctccaactccaggtatttctttgaccgagcacgaaattccatcagcgatctcacagggtctttgtaaatggatttagcgaatcttgacgacccattcaacccggcagagatcaaataaatatgaactttctcttccaacccctgcacctgtaatgctgctgcttctttaaatcggtccaaatagctttgcaacgtctccccgggtagttgctttattttccccaaggtaaactcggacttcggctgcttcttactagtagcaaaattcaacaagaatttctgcccaaaatcttgagataatcggctcatcaatgcccctgacacacatttgcaaatcgaactcgtcaatgtgcacttgtgggtcttgggttccatcgtattttgacaggaatgatccgtcaaaatcgtccaaatatcgagcattcactatatcgtccacaaaagggctgttgttttgttgtccccggctatacttcctacgatagaccggtccttcctttccgcgaacaattgcttccccatcttcgccgtgatctgtcactttttgtttggttcgtgtaacttccgggttctctactcggttgcgatcgttctcatcatttctgggctcgccgtgcaaatggtcgggaactcggatatactcactttgtggattttcactccttatctggtctccagactgctcggcgtcccttgattggctcacggctgttctcggatctcgttctgttggtaacggctgctcctcctgattctgaatgtctacacattccaccatgacctgtaatctccgctccaactgcgctactcattgtcctttagcgcgcttccattcttcattacgctcctccatttgatgggttatctcccggatatcctcctgtctttgaagtgcttgtctcctctccatgctttcaattcggctcaagattgaattaagggcattactaacgaatctctctcccagctcttcctcctgtatcatcctccgcggcggaatctcccttcgttgctcaatcgggacaggtgaagatgctgcatcagagacgacttcagtaatgtgcactccctcacgttgcaccacgttttgattttctcgtaagagtatctccctgttgggcatctccgaacgtggtactgaatgactgtttcttgtattcaccattgttgaatcgtgggactcgaattttatcgttccccacagacggcgccaatgttccgtatatttccagaacacaaatgtacaacactgatgtgctgaatgtttgctgttggatcaatcctaactctgcaacctcaagggtatcgatggagaatgacaccttgaagcagacgatcacacagaaataccacaatggacgtggggtgtgtgctctgtgtaattgaaagagatagaatcagaatgaatgtgtacctttttggcaacaattaccatgtatttataagcatcataccttgcagttgtgacacaaactgcttccgagaatcttggcctccataagcatatctcaactgctgggattgactcagttatagcccacgttcactaaaaagtgggatacaggatgaagataattgagccttgctattaagcccaattgtcactaccacaacaagcctctatacatttaaatgtcctcatgaaaatattcttttctcattcaagtggttgcactcagtcctttaatttaggtatggctagtttatagtttacacgtggctatttgaaataataaagattataacattaacttatgtaaaagatatttttgttttaatgtttgcctgatttgaacaaacaactctctagattatagaattttcgtattattgttgagaaggaaaatgcgatcagggactattttaatctaattataaaaatccattttgcttaatccttacgcaaagttttactttcacttgttatggcccagatggtaataccgatcttctaaaagatcgcttgatggattgattgtgctttcttccaagatggtattcttattcttcttagaaaaattgctaaatacagtatccaacattgttaattgcacctccctttttctctttggtattcccccctctgtaagttaaagataccttttctaaaacctaagttatgaaatgggttaaattttacactttcagaaattaaattctgaaaatattaaaattttaacctatctggttatttcctaaaagcaaaatagggggagttgaaaacggtgtggatgttttctctctttgctcttttctttttatgaagagaagtgatttttgtgggtgcttttgaatctgtttagacacaagataacattcaaaaagtgtaaccatgtaaggtttaaaactttaagcagccataacataaatcaacattgtgtaaaatgttaagagaaagaatacaccaaccattaaaattgggaagaaaccaaagcctagtcaggaatgatgctaccaatggtattattgcatacttcggttgcgtggtagaagtttggacatggaggtgatggatggcaattgtagtgaggatggagtgtagtaaattctggtgttggtgccttactttgaggggtaatgtacggtggtggattattgatggaatatggaaggctggtgagagatatatatgaggcacaatggtggccggttaccaatttctggtgattcgaaaaagcctcatgtgtaggtcaataaaaatattatgtttttattactgttcataccatttttttttcgattatatcataaattggtctttcgatattttgattatcaaaagatgatgatgagatatcaatagtgaagatcgaagaccaaagtaatcacaacgaatattaaagacaaaactatcagtggtggagatcgaacactaaagtcatcatcgtcaatgaaaattgaagacaaaatcatcaatggtagaaatcgaaaatcaaagtcattgatagtgaaaatttaatggaagtttatatagctgttatgaataattataatttgtactctataagtatagaacttgtatgctataatcttaagtctccacgacgttcatgaatcgaccggttagtgcaatgttctcaaccattttcattttctttagtagagtaaactcttttaatgacatcttgttcttttgatatcttctctttctattacactttcctttttcaatgtatctttcttctttctattaacatcttcttttatttaatgcatattattattttgttcaattatacttgcaatcatatattttaaatcgaactgaacattaaaaatttaacacattaacccatgataaatgatcaagaggatatatgaccttcaaagaaaatattgtatcgttcttcaaatttctatggaattatgtttgttcacaaaaaacaagtacaacatttaccaccaacaattacataatgattgcattatttaatatttatctcaatataattgagtctctattgttaatttgtcttaattacaaaccaccagattcttatatagtcgtgttgttggtgctttaatactaaaagttgattggcttactgattgtcttgcatttggaactattttccaacttggaaagtaagttgcattatcataattaacttttacttctcttaaaatttatgtaccatgttctttgacaataagtacgtacgaagtggtacactccttctcattgaaacaatattaatttgaatatgaataagtatgaaaaaaggaacagtcaatggatnnnnnnnnnnnnnnnnnnnnnnnnnnnnnnnnnnnnnnnnnnnnnnnnnnnnnnnnnnngaaaaaaaaaaaaaagaagatgatgtatgtattattcagattatggaatactttgtagtataaggtctccattgctcagaagagataaagttgatttaatattaaataaaaaaaaaagaaagaaatatattgtaagttcaattctctagcaaaatactaacaattaacacttaacatttatcaataaaaaaaattctctattgctccctacccataaccaacaaaatgataaaataccctctacccattccccttttcattatattccaaaatcacattcctctatttagtaactaactcattatttccctttctcaacattcttcttggtcttccttttactgtaaaccatccaaacttcaggcttataagacaattattaagctcacattctgttttgaccttgtaacttatttgaggctctaacactgcccccttctgcagctccaaccttgtccttaagcttaaatctggaaattaaattcgaatagtcaacttatcttcccaagtacatagcttcataaacaattttcctttccattggaccaaaatgtgaacaatttccactcttactttgatcatagactatgtagccaacatagcaattgactcgaacatatcaatatactctccaatatccaatccaagaggtagatcttgctaaatcatgtaagcaccaacaaccttctttcattcaagcacaccttgaatcttattagcatccacaaactaccctttccttggaaaccacatgccctaaatactgatgaatgagtaaaacaacatttcttcttattggccactaatttatgcttaaataaggccaggtctccacaagtacctttagatgtaacatgtaattgtctcaattgaggctataaatcaatatttcataaaaaaaaaacagcataatttgcctccattgttatggaaatttcactcatcaaggattggaatgtggaaggagcattcattaacctagaaagaattactaaatgctcataatttccttcaggagtcttgaaaatagctttatgaatatccttatccctcccccttactttcatgtagcccaatttaagatttaatttacgaaaaacattgtactatgtaacttatccaattactcattaataagtttaagatcggtgcaattagtaattttctaggtaaaaaaaaaaaagtccaaattcaattcaagcttctaaaataagacccatgttcaataaaagcttaatttggataaattttttatgggttaagcctagatcaagttaaaaagacctttatttaatccatactcaaagtttaaagcccaagtccaatatttcctcaagtgtatttgagatagaccaaatgttatagtaggtttgacaaacaggcttgtttgcaannnnnnnnnnnnnnnnnnnnnnnnnnnnnnnnnnnnnnnnnnnnntattaggtcatatcacattaggtactttatgctcaaaatttaaagttcaagttcgatattcaaattgggaaatggctaaaaaaaactcaaatttaaattgtgctcaaaatttaaagcataaattctatgtttggttggcttgactcgaatcatttggtcacctctagcaaagactaaataggagtagaagaagactaggctagaggtgcacaagatcgagtggaaggaaatataaaatagaaccagacaaattttttaaatttaaagcctaaaacatcaaatatgtggatcaattgacatatgattgtttcaacttaattgacagtcttaaattcgagtccttagtatatttatctaactcaaatataattgttttccgtaaaaaatacttgttgttcataccaaaaagtcttaaaactaaaactagctagatttattttttcaaaatcaagttaaaataaaatcaaattcatttaaaaatcatttcagtatatttttacttaaacaaattttgttttcaaatttaaattagaaaactgaaaggagaacatttaatagataccaccccatatgctaatatagacatagagagagacgaaaaatagagaaaaatgataaatgtaatagatatttgatatgataagaaaatttgaaaaataaaaacaaataaaagaagtcaattgattgtctaaaatattggcatttacaagtattactactcacctgaaaacttatatttactctaaagagcttaatatagcttttaatatttcttaactaatacgtagttttcactcagtgttctagttttcggttatccttcctcgtggcttccatttcaaacaaattgaatatttttgtgaaaggacttttatgacagttttaaagactaaacaaacaaaaggagcaaggcaaaacagggaatattggagacagtcgagctgcccttgtcatttctttaggtgttttctctagatttattatgcaacttacgagggagttataatcctaatctgattatgttcacaaaatcttaagagtacacaagcttcaaatacatggctgtatttgattccgatttgcccaaaaacataattcaattttttgttcttaatccttctatttataaagaaaaagagactttgactaatctaaaaattcaccgaaagataagtagaatttgatttttccaacaattggatttaattttcctatttaaatatgtttttttttcatgcaattaaattaaattttnnnnnnnnnnnnnnnnnnnnnnnnnnaataaacaaatttaaatcccatcatgatgaattcattaattgacatgtcaaataaatttaaactcattattgtcaattgacatgttaaaatttaatggatttataatgactgtaacataacagttataggtttcttttttcaaaataataaataaaccaaagctcaaattatatatatagagattaaaacgttaccaagaaatgtagagattacaagcacaattaatgtgtttataaaaattaaaaatatatttaaaatttttcataaaatatttaggacaaataaaatttattttaaaatggattaagattatctaattttattataattaatgaacatgagatgatcatataattcatattataatagaaaaataacaataacatgatatgatctcatcaacaaatttattatatataatgagttatgattattctgtgattgaatgtgtagaacatatataattctttttctcaagtaataaagcaacaattcttaagataaataagaataaacgggtgcaaaataaaacactgctccgcagcagatttcagttgatatcgtacaagcatcacgctaaggttgcttttgtgattgataaggggtgatttctacaaggtttttgacattgacaaaagattctcgtatgccggaaacttatcttactttattagccgaagaaagtccaactcaaaaatcagctacaagcagtatgggaagaatatatatgggtgtacaaaatctgttttatggtgaacaaaatggttatagcaaatgtgtgaaggaatgagataactgaaaacaagaaaaacatacatttttctaatttactaaattctaatcggatagaacgtgggggtaagtaacatttgaaaattttgaaaccctaattccgtattttctttatgatccttttctccatctaaagtagacaaattttcttaaagtccacttatgtaacaggatatttctattttttttcttgtataaaccacaagtattttatattgaagacaattatgctcaatcaagtatgatagtaccactatatttaataaaattatttcttcaaatatttaacataattatatatctgttaaattcaaaattctggttaattactataaaactgcatgcaataatattcatttcctataaaaacctctaattttagtttataacttttttacgctataattactgattacatgcctgtatatatgtttcaaatcaacagttactagttactgagtgcaagataataagccaaagcaaaagtcagtttccttgtgaaacacatcttgtaatctccccaagaaagaaagagacagctgtgtacggttctaaagtttgtttttgaagaaaaaaatgaggcaaaaattaaagaaggccgaattagacatggaacaaaagagaatctacaaatatcaattagaagagccaaagatctcactctcaactagggtgtcaaaaaatcatcctaaccaaaacttaaaaaacatgtgctattcaatttttatttaaaataaaatctaaactaaaaccaaaccaatattttatagtttgatttgatttgatttttgtgattttaattaaaatatttttcattaaaatttatataacttctttctcaaattttaaattaaatgacattaaaaaattgctaataacaatttacaaaatttattaatatgttaaactttctacaatataaaaatttgtctaatttttattattaattttaaaccaaacatatcttaaaaacattgtctaaaaaagaaagtgaaatatattgtataaattcatatacataatactacaaaattccatgaaactcaagtggtataccgggaaaccaaatcaatcaatttgaataaaaaattattcaaacaaataaaaaagaatctatttagtttgatttttgattttttttatagtaatttttaattattattttggatcgatttgaatttaatcatccgctatactctcaactaaagatcttccccactcacttctttataaatgcgtgtgctctccaatgctgctatgcaccaaaagcaaaacctagccatatatgaatcgagaatatggcaaacaagagaaaaagatgggaaggtcaagaagatcaaggaaacagtaaagaagtgaacattgaattggagcaactaagggaagaagcagcatcaatggctgctgctatacttattgctagaagagctaagaaacgttacattggtgtacgccaaagaccctcagggagatgggtggctgaaatcaaagacaccatacagaacattaggttatggttaggcacttatgacactgctgaagatgctgctagggcttatgatgaggccgcacgcttccttcgtggcgccaacactcgcacgaacttcttttctgcacaatcttctcctaattctgttcctgctcttcctccaaagattgcaaaacttctccttcttaggctcaaagctagaaacatggcctcttcatgtgtggttactccttttcctagtaaccactatgtacccgaacccgaaactgagccacattttatcatcaaatagaagaatccaattatggaattctttagatatggtaggaaatgggattgttgaacaaaattattattgtgctagttatagttcttctgccataataactagtgactttagttgtggtaattctaacctagagggtagtagtagggaggattcaagactagggtatcattgtgatgacaatgtttatgatgaaaacaaccagattgtgagtggtaacgagtttaaagactgtgatgttgggattagtgattttcagtttttggacactgctggatcattgagttgctctttttctccttttgagatagcagaagagatggtgggatcaatagaggaagaagagaaatatggtgttgatgattcaccattaggtagagaatctttcaggatgaagtatgaacgtaaattctcagcttgtctttacaccctaattggggtgtctgagtgtttgagcctacaagttggacctgcaggaaatggaaaggaattggaaaaaaaattgaggatggaaaatagcttagacgtgaagaggcactaacgggaggacctgaattttgttccattcttttggagctctcttcttgattttcaatattctagttaggcagcaaataaaattggaatagcatagattattctttctatatatcttttactagaggatgacatcttagtccatattctttaatttcattataaataaagcaaatgcagttttgctatttgatgatcaatggttttctgtcctataaattcctaaactatttactcaagatgttataataccgcagaagtttcaaatgcactcacttccacttttggttcctcataattataatgatacaattttagttttccaaaattcttattatgtaggtatcacaaatgtgtaattttaaaattctcaagaagctaaaattataaaattgtaatatttgatggaccaaaaatacaattaagactaaaaaattaaaattacttaaaatttaatttaggttatttgtgttacaagataaagtagattataatattaatcattgaataaccagatatattaaccaacgaaactaacaactaatattcaaaaataaaaaaaacattgaataaccaaaaatagagtttaagaaattttaattttattatgactataatcgattttatcatgacatttattgtaacacctagttacactagactcaaccttaatttactatccgttagtgggtccatgccttttatttttcattttacaggtgtcatgctgccaatgcatgcccctaataacatagtgctcaactagggtacttattcatttctcaaggaaatctcaataattctttcaggtgtcatgctgccactgcatgccccgaataacagtcacaaactccgtgacatcctacttttgattgttaatgctttcaacatcaattttagcatccatgtcaataatagcattgttcaggccaagatcataagggataaacagatagttttagccaacacaaactgatcctgatcatctctagggcacaaaccaatgcctataattttctgctcattattgaaagtcgcatccacgttgcacttcaggaagcctagcctgcaggggttttaatccaaatctttttgttattaacattattctccacctgtccaaaattaatggattgatttgctaccatcaacttttctagggaatttgatgctcacaaatatatttgtaattaatactgtttcgttattttcctcccataaagaaccatggcaatcctagctctatgatgtgcatcgaccttgctgcataattccaaaatgatatcatgaaagttgtctgaagtatcaagcaatctattcataacatcctaactcccttcatgttttcaacatttaatactattggtgcatttgaagaactgcatgactggtctaagagtaaagcaattaaaacttgaggtttaagtctctcaacatttactatttgttttttaaagtaaaaaagatcacacattttaacaaaaaggtttcacatatcactcttttctttatagaaaaaaaaaatctctcaatatttattttatgcctcactttttgttgggttgggcttgtaaaaaagatatgctatgagttttctaaccctgaattgcacacaaatagcaggacactggacacctttggtttacaagcgagttcgagtaggaatacaatccctatatgctctccataagtttctgaatattaggggaacttttaatttccaaatcattttccaatcaccgttcatatcgtaatccttagtttccaccaccctattcatacataagttatatgcagatttaacaatacatgtaccttgtttagcaggccatcaatatataattctatccttcttgacatattgcatcaaattaatttctaatgtttttgtttgccttatcctcaagaaaaagatcatgtatcatcacattgttccaggttctagttcttataatcattaggtcacacccaccttcattcttgcatttagcattgggattgtttgaatgaatttgtattgagaatcccttagccatggatcttgccaaacacgagctgtagccctatccccaatacggagatctatagccctctcttaacaatgttcaagaacttcaaatgctatgccgggaaaagctaggattatgtttaacttgtgcatccaaaaagtttccacttagatagtatttaggtttgaagagctttgataacatagaatcaatgttggaaatcaatttccaactttttttcccccaacatagaaaggttaaaagcctatagattgcaaaaacccatcccttcatgaacctccttacatgcgagtttatcctaagaaagccaatttattcctttagaagttctaccctttgaaccccataaaagaaattcatcatcttctaacacaatgaggatggaaggagaaaaatactcatggtatatgaaggaatgacttgatgcactgattttataggcacttctttccctacttttgcaaaaagattcaactccaagagtttattttcctccaaactgtcattctaaagttaaacgtggttgttttgctttttccaatcaaggatggaagacccaaatacttactcgaaccaatacttaactgaacacccattgacatggacaagctctctctactttgttgatcaacgtttctgctaaaataaattttagacttgtgtaaattaattgttttgtccgacacctcataaactgtaagaatgttcttcatcatgctcatctcattctcatttgctctaaagaaaagaaagaagttactagcaaagagcaaacgagaaatgattgggggctcccccaccgttgaataagtgcgaagaccttcagagctaagaatgaacaaatatcgagatagaggatctccttggctaagatctcttctaggctgaataggcccaacatatgatttattaacaaaagcaaaatagtttattgtctcaacacacatcatgactcgattgatccaacagcgcgagcaaatatgatccttttcatgatatctctaagtaacacctatcaacccaatcatatgctttgttgatatatatttttaaagtcatgtcatctttttcaagttaatgattcaaaattcgcttaaatatatttttaatcatccaaatatatggatatttctgattcaatcctccaaattaaaagttattttttttagtcctctaagttcataatgtgtttttttagtcctactttttttagttctttttcatatatggcattagtataggccaaatcaggaataataaattcgtaatttgtgatgacttttgaccattagatatttgattttaatttaaattttaaaacacaatttcttgaggttaaaaaccgtcacaaaattttaaaaaatacaaaattcatatatatctttctccattctctttaaattaaaacacacgaccacctccatttaattcctctttgatattgatttgaaataacaaaccataaataacaagcaaagcggcatacattgaaattgaaaggtacccatgtatcaaggaaaaagaaattgaaagatacctaacaagaaacaaatactgtacaaaaaaaaaatcaaaaataaattacactcatctttcctatactttaacttattacactaaatctcactcattgttgaatttgtacacaaatcccctcatatttacaattccattacacagacaacccctgcactctaacatacttattcccattaacttcaaatcatcacatgccgtgcacatgcttatttaataaaaatttcaaacaaaattaccctcatcttctttggcacctctagcagtgatcctgccgtataacttcaaatactcatcctatagtagtattttataacctcggacagtcaacaaatgaaacaataaaatgttgacatgactaagaaatattctcatacatagaactagaaccaaaggggtctaactcaattggttaaacattgtgcatgaattattgtaaacccctaatacctgagtttgattactatggatcaaaaaaatacatagaactagaaggaataagcggttaggcatacatagaaagatcattcaatgcaagcaaaatcagaaggaatacgtagttatgcacacatagaaagatcattcaatgcaagacaaaatcagaaggtgaatcccttagacagtaatctacatatggagatttctcaacgcaaatgagctcagtatactttttcaagaatccacttggtgcatactgagtatcaacagttgaactgattctttatatgtataaaatttaacaattatgtattcaaaattgtaaaaggcatcaagtccactgaattagagaacaaactttcaaacatcacaacaagtactttcccttaataggcagatttgtacataccaacctaagacctctcagtgaggcttgtcgcatgccttagccttgaaagacccctaaacattttagaacaaagaaagaaatatacttttaagcatcaggagatatttgtaagagacagatataagaacagaatttaatagactcaccttttacatctttctcaaatagtacagattttagagatgagcatatcggtctaaataagctaattgtagttaattgatgtttgaaactaaagatcaaactgtgtatcacaagggaacaatagaaatgtggttcaatttaaattaatttcttccatttgtctataaaatattagcttttccacttacactcaaaaaacaaatacattgactatcccgcttatatgtttctccatgtttgtaatataactaaaagaagcaatttccgtacgctgaaatgagcaaagtccattaaggtaaaagccatccaaagtcattcaatctacatagctctcctgtcctatgctcagaagaagaattgttgcaacttgcaaggatcctcaatggcaacacaattttctgggaacaatctcttacagcgtccctctgcatcttatcaattccatcggcacacaatcaatatcatggcggaaatgtcattgaatgcccattgattcagcagaaatggccatagtttctaaaattgacttgccttcaacatctgagatctccatgttagaagatctacagctgaaatagaaaactgcactcatcatggaatctataagcaccacaaatgaatacattaccaccaagagcggcccttcccacactctcgaagatccatcaccatagctcagtgtctttactctgtgctcaaacaagccctccacaaaggccattcctatcgttgatccaagaaatatcagcagacccacctgcgtctgacccttgatcaaaatacttgaccgaagcatcgcctgcgctcctgaaacatcctccaacactgagatcaccatcgcaatgttgcagatgattatggcgttggcaaagacaaccgagaaaaccagcccaaccagcattgcacaatacacaacaacatccggtgaaaacccaagaacagccaaagcactgcagaacgcgacaaggaaaacacagaacaatgtaatgcagccaactataaccgtacacacccacatatatgtgaacaggatcttcctccaaaacttggcaacaatcacacaaaacttggaagcatcgaacttcttcctcgaataagtacaatctacggagtagacgaccgcagcctttgacaacaacaacaatgtagcatagaaaggaaagcacatggccgacgaaaccacggtctccgcgaaccgctgacaagactgtttgatgattggtctgagagggagaccactagtctgtgcaaccaacataagcctaatgaacagattcttgacaatagactcatccactattacattagacaaaagcacagcagaaacaggacaaataagcataaaagcgattgccatgaaaccccacgaattgaacctaaggatcctaacggtttctttcagaatttccaaagcgttcatcgattggatttggaaattgcgatcacgatcagagagttccatgtgctgaaaaggggttccctcggatccctcttttcttgaatattcagacctaatcctaggagaacaatctccactggaaatctccatttgggtgttcataataataataataataacaaaaaaagaaagattatttatttcattggaattcaagattcaaacaaagtttggtgtgaaacccaagatctgaaagagctagattgagctcagaaaaagtgaatcacgaagtgggggtgtcttcagcaaagggaaatatgagtaatggaggttgaaatgagaagaatgaaggaagagaatgaggaaattgagttaatacagtacctagaaaatggaaattcagagcgttgaaaagtggagcattgaagggattttgtgtgggagaagaagaagaaagggatttcgtgattacccaattctgcgtcccttgcacagtgacagaggaaaagaggttagtggtaacatatgttatcacttagtaactctagttaccacttttatgtttttataatttttttaaacggaagtagtcaaagattttactaattcagtgtaatgtttttaaaatttatgattttaaaatcataatttttatttttattttttatatgtaaatgataaatatatttatgattttcatgaaattagtttttttaatatatttatgagaaaaatcgtttttttagtcttaagttttgttttttttttgtcttcttgttaaatctttcatttttttttaaatttttttcttataaaaacataaaagtggtaactagagttactaagnnnnnnnnnnnnnnnnnnnnnnnnnnnnnnnnnnnnnnnnnnnnnnnnnnnnnnnnnnnnnnnnnnnnnnnnnnnnnnnnnnnnnnnnnnnnnnnnnnnnnnnnnnnnnnnnnnnnnnnnnnnnnnnnnnnnnnnnnnnnnnnnnnnnnnnnnnnnnnnnnnnnnnnnnnnnnnnnnnnnnnnnnnnnnnnnnnnnnnnnnnnnnnnnnnnnnnnnnnnnnnnnnnnnnnnnnnnnnnnnnnnnnnnnnnnnnnnnnnnnnnnnnnnnnnnnnnnnnnnnnnnnnnnnnnnnnnnnnnnnnnnnnnnnnnnnnnnnnnnnnnnnnnnnnnnnnnnnnnnnnnnnnnnnnnnnnnnnnnnnnnnnnnnnnnnnnnnnnnnnnnnnnnnnnnnnnnnnnnnnnnnnnnnnnnnnnnnnnnnnnnnnnnnnnnnnnnnnnnnnnnnnnnnnnnnnnnnnnnnnnnnnnnnnnnnnnnnnnnnnnnnnnnnnnnnnnnnnnnnnnnnnnnnnnnnnnnnnnnnnnnnnnnnnnnnnnnnnnnnnnnnnnnnnnnnnnnnnnnnnnnnnnnnnnnnnnnnnnnnnnnnnnnnnnnnnnnnnnnnnnnnnnnnnnnnnnnnnnnnnnnnnnnnnnnnnnnnnnnnnnnnnnnnnnnnnnnnnnnnnnnnnnnnnnnnnnnnnnnnnnnnnnnnnnnnnnnnnnnnnnnnnnnnnnnnnnnnnnnnnnnnnnnnnnnnnnnnnnnnnnnnnnnnnnnnnnnnnnnnnnnnnnnnnnnnnnnnnnnnnnnnnnnnnnnnnnnnnnnnnnnnnnnnnnnnnnnnnnnnnnnnnnnnnnnnnnnnnnnnnnnnnnnnnnnnnnnnnnnnnnnnnnnnnnnnnnnnnnnnnnnnnnnnnnnnnnnnnnnnnnnnnnnnnnnnnnnnnnnnnnnnnnnnnnnnnnnnnnnnnnnnnnnnnnnnnnnnnnnnnnnnnnnnnnnnnnnnnnnnnnnnnnnnnnnnnnnnnnnnnnnnnnnnnnnnnnnnnnnnnnnnnnnnnnnnnnnnnnnnnnnnnnnnnnnnnnnnnnnnnnnnnnnnnnnnnnnnnnnnnnnnnnnnnnnnnnnnnnnnnnnnnnnnnnnnnnnnnnnnnnnnnnnnnnaaaaaaaagaaaaaataagacaaaagaaaagaaaataagataaaagaaaagaatgatgaaagaaggagggataaataaagagaaaaagaactaaaaaaggacagtatgaaacatagagattgtaatgagtctaactctccaccaagcttatatataataatgtacatattacatatgtacattattatataattaatacgagacacaaaattaagtgcaaagaactataaagataagataataataagattttagataggatttaaagatcaataataataggataaaaaaaattaacaaacatagacgtataaggaacataaacctattctagaaatgtatttctagaactatgatacatagttttagaaatatatttatggaacaggtatacattattttggaaaagaaaaagggatttacaagggatggatctctttaaggaaaaaggatatgatgaacaattaaaacataaaaaaggacaatggaggtgtacttaggaaaatacaagtgtaaatagcaagtgccccaatgtcatcaagaaacacaattatctcaaaggtccatggaaagtttaaggtgcgacctagaggggcattgctattggcccctatcaagtggctgaaactttttttcccaaaaatatcctccccatggaataacatttttgtcatagtttgaagatgcgaacaacatataaacgaaaatatgtttctgttttagatttggtatgtggaaccatgtttccattttatatttcgtttgcaccccttacattacaacagaaacatgatttcgtgtacaaaatctaaaacggaataatgtttccattttagattttgttacacgaaaacatttttctattgtatattcgttttggcttaaaaaatacaatgaaaatgtgattccatgtacaaaatatgaacggaatcatgatttcattttagattttatacgtagaatcaagttttccattatgtatttgttttgacttaaaaaagagagagtgtatggataactatccaaacttatgtatttgaattgatttgtttggataactatccaaacttatgtattttaattgatttgtttggatagctagagtaattcaaatttcaacctaatccaaaaattcattttaaaatatttattaaaaataagatttcattatataaactttactaaaaataaacggttgtcaatttttttatatttaataatttaaaaataattttaatattaatcaaataattttaaaatgtaaatatttaataaatagaatttataaatgcataaggatcttccaattcaaatttgtgaaacatataattaaaatgaatagnnnnnnnnnnnnnnnnnnnncattgtcatctgatatttgttgatcttgtataataaactcacccttgcaattttgtaccgtgtttttggtacctgggtgatcgtgaaccttcgttcatgggagcatatgagtagcagtagtaggtgtaacactgatagttgatcaaggtcccgtaagacctaagtgtagtattgattattgacaagggcccaataatacctagatgtaatactaataattgagcaaggtccaataagacccaagggtaacactaataattgattaggacctaataagacctatgtgtaacacaaatgaatgaccaagacccaataaaattcaaatgtaatactaaagattgatctaggctcgataaggttcaactattttctcaattatttttagtttttatcttatgaattatatagtaatataagcttatctttaactatgatatttttttttgaaaaatataaaaattcattttagaaacaaaacaaaaaagattaattgaaaaaggtaagggatcttcataaattcatataatctaataaaacaaattgataaaaaaaactaaaaatgtccaatcaaaatcactatagataaaatggcaaaagaaccaaaagggtgtttttttaaaaaatatttaccgataaggtgcgcttnnnnnnnnnnattttatatttgtcaaacttagtttaatgtttgatataaacaagtaaaaaaaaactgcatacacagccaaaaaaaatcaagaaatttatattttttaaaatgatctacagagaaatggatcttctaatttaggttgtcttgtcaatgttctttctatcacacctttattcaacagtactcaatctgaaaattcaactgcctacccccttcttctcactagcttcagtatttttcattgtgaacctcaattcttcaatggagaaaataccccatacatgttcaaagcattttcttctacaaataatagaaaaaacatttcaaaaactaagaactctaaacagaaaaatacaccaaacaaaataatatatcataaatatctactatcaaaatatgaaattacatgttcttcatcaaaataaactcctatcaatatatgaaaatgcatgttgttcataattaacttggctagcagtgatatataaggctatcatctattctttcttttgcagtaaatttagatccaatataaaatagtcaagggctaaaatctgcaagtgggtcaagttttttggcttgaactaatgaaacaacaataaaatttaagagaactaaccgttgtaatagaatttcattactagaactaataaaattctagttgttaaataccatttaaagatgggggtttagtaggaaaattaattcgtggaaggagaacttggaggaatggggtatagaaaaaactgcaggagattcagggagataaatgcttgtaaacaaaaaatggaagtgcttagaaatgggtgaaagaagaaacaaaacaaatatcaaagaattcaacgatataaaaaatcccatcaccaaacttcttgtccaagaagaaaaggttttggaagcaaatatcaaagtcttattgggtgaaagggggtgataagaacacaaaagtatttcctttcggccactattaggaaaaagaaaaactagattagtagtttggaggattataggatggccttttaggcccaaataggatgtttttacaagtagatagttttgatatttttgttttaatattattttatatttcctaaaaatactataatatgtcatttgtatggttggtattctttgtaaattcatatttaatagggtatgcactgtgtaaaaaattatcaatgaagaatattaattctattaattttggtagaatgacaagagtaatgatagaatagttatcttatgcctatcaaatggtgctttcatcaacttactccacctcccccacataccatctcacttaccagtagccaccaccacagtcgtcacctccatggccaccaccccaatggcttccaacaccaattttgctccccctcctttgcttaacccttaaccctcgcaacagcttccatcatcatcaacccaacaactagaatttcccctctatccccatgccttttgtccccctccatcaaacctttacaccatttcttcgtcaaaccattttccgcaaacccagtacgtacacctcccaaacctaaccacctcaacaattttcactattgtgcaaccctcatcgcaagatgcaaatgccccatgcccccataccttctctcacctattgtcaacatattcattttaaaccctaaccaattcctctctataacactcaacacctcccatggagacatcaaccttttccccactatcctttaccaacaacgtctcccacacccacactgctaccgttatagtactctgcaacctccttgcaccaaaacatcttccaaccatcatcgcaaccaacacatgtgccacatccctactccgttacctcgcaaaaccccacttcccttccatgtccacaaactagacatgcaaaccacaaagcataggaagttggtgttaccaccaaaggatgaatatcaaaaatcaccaatggcttccgtaacggtggcacaacaaaccctcaagacgtagtcaagggaagatatcgctctagtgaaaaacatgttggctacaatgcatgctctggtgaagcaacagtcgcaggagacacaagagaccttttcaaaggacttttgacatcaccgtaatcgttgtccttctatgcaatggcttccatgtcgtagttgcctaccacaaccctgctcatgttgttgttgtcgaccttcgcactgtcgtccctgttgtcacaatcttactccgcatgctcgtctacaatgtcgaggttcgtatcatgtcgttccattactagaaagaatgctttcaacattgttactttaacatcagtttttcataaaactgatgttaacaaaagggcaatgacatgtttgtaaataaattgatttttttaacatcggtttttggaaatatcgatgttaagtggcaatgttaagattggtttatgaaaaattgaagttaacgtggagatgttaacatcggtttctgaaaatcgatgttaacatggcgatgttaacatcggttttttaaaaactgatgttattttgtgaatgtacaaaaaagtgtattggaaaggttcctcatttttataaacaaagcgctccttcttccatctcactctcaaaccctttttcctctggctctctttctttgctctccctcaccattgttgtttcctttggcacaaaacagttgaagtaaatgacataaaaatgcatgttgcagagaaatgagggggtccagtggtgttattcctccatggtttcccggagctctggtactcttggcgccaccagattcttgctctcagctccctcggctaccgtgtcatcgctcccaatctctacgactatggagacatcgaggcaccagctccgataaccagctacacatgctttcacatagtgggtgacctcgttgcactcatagactctttgggcatccaacaaatgttccttgtggctcatgactggggagcccttattggttggtatctctgcatgtttccccctgagaaggtgaaggcctacatctgcctcaatgtccctttcatctgcagaaaccccaacgttagaccctagatggattatgtgttgtctatggagacgactactacatctccaaatttcaggttaattctttttatttttggccagccctgttgctttcatttttatttttaactttttactgcctttgcccatagtttaatcttcgtaatcgcaagcgcaagctgttgttgcaaattaagtggaacccgaataattaggatatctttgtttatttgaaatgaaagatagatggtaataattgtatttaaagtttaaaccatgtgtgactgcagaaactaggggaaatggaggcttagatggttgaagttggcattgagtatgttctcaaaaacctccttacaactcgctaaattggtctttcgatctttctcaagggagagtacaaaattggattcaatccagatatgactgataccttgccttcttagctcacagaagaagatctagcctatttgagaaaattgacttcactggaggcttaaaccactacagaattttcaacttgtattttcttgactctcccttaattattgtttctttttttgcagggatcccatttagaaagactaatgattatttatttgcagaaattgggaactgacagaaacatggacaagatgcaaatcaaggtgcctataaaattcattacaggtgagttggacatggtatacgccttgctaggaatcaaggagtatatccacgatggaggtttcaaggaagacgtgtcgaatttagaacaagtgattctgcagaaaggagttgctcacttcaataatcaagaagcagtagaggatatcagtaactacatacacgattttatcaacaaattttgatctgatccaaaaatgaattcaaccaagcatgcacgcaaggtgttcgacgaaatgccgcagtgaaactacagcctcattatacgtatcataactctttcattcaattgctttgttagcgacactgccactcatcactctcttccaattttgcagagttggattttcacctagctcgatacgacaaatgccattatgctgtatacgcacttgtttatttggctccttatcttaggtaccacactttctttttgttgttcacattctttaacaacatgccttcctggacaatagacatgttgtacttaagaatgatatcatattttgattcacctgaacaaagttggctgcctattgctagcattctcttctgcatcattcacatgtaggttcaagatcattattacatttttcttatgcttgaaaatgcaaaagaattcacataaccagggaagatcacttaaaagccaaagtgacaaattttataactaaatattcataccatcatcttttcctctaagtctttttcaagatgcaaacaaccaaactatgaactctagacaaaactgcaaatgtctaatgacataatgaacaacaaaattacttacaatctaaattaaagcataaaataatctaaaataagcaggggaaaggcacaaacacgtgtctcaacagcttttccccatcgtgcccaacgaacctgtgggccaccaactcctctgcgttcatggtgagtggctgatatccgaagatcatatctcctttcttgatctcgtacgccgcatcgtggctctccaccaccagatcatgccttgccttcgcgtactggaatgacaccgtaggcttcaaagattgtgacatgcttcatccctctttatgcccatgcactccacttcgtccagaatcgcaatgcctattacatataatatacactaagaatatgttacttgtaattttacctattgtggagaaacattcgtagagtttcttgtagctagatttgaccgtccatgctggaaaggggattgttctgattaagaaatcctcaaagtagttgaagagccaggtttggacaaggttgtggccgtcgaagccaattttggtttcagaggggtctttgtcggtgaggagacagaagaggaagttgaaggtgtcggagctaacggttttggccttgccagattttcaagcgagcttgtcttcgagatcagcgaagtgctcgaagaggttgttgcagaatagtgggaagaagattttgtgcttggagacgagcaagttgaggtaggatagaatgattaattaggtttaggtagcttccatgaattgatcactttttatctccacgctcacattaacaacatctgttttcaatgaatattgaaaactgatgttaacttctagtagtgttaacatcagttttttcttcaaaatcgatgttaacataagttccttaacatcaggttttgaaaaaaccgatgttaacatagcgatgctaaaccattattttctagtagtgcttacttgatagtgtacatgatccacatgaatatcaaagtaacccatgggctgccctgaatgaaggtcacaagcaagaatatggtctgccccagcttttgtgataaggttcgcaacaagtttagcagcaattaattcacgcccttgagtctgtaaaggggaaaaaagctccattagttgcatgtgaaacccatttcttgacatcattaagcaaaaacgcaaaccaaccgaaggtaaaaaaattcaataaaataacaaaggtaacacaagattgtttctccatttaacaacactagcacacaagacaatgggagaattgaacagatacatcacaaactggacagaaaatttccagaaagagaacaaaagtacaccaaagcattaaaccaattagtaggagaatcttgtctacaattgcaattgtggattaacgtagactcctccaataaaactaccgattacaaaaatacaaaagaaaagtagttatgtccaaaatacttgcctttctattagctctagcatatccaaagtatggaatcacagtagtgatatttttggtggatgctctctgacaatcatcaatctttattttaagctccgtgagattttcatttgcaggagggcaggttggctgtataaggtaaacattgcaacctctaacactctcttgtaactggacatagatttcaccataagcaaatagcttgatggaaatctttccaagttccaagcccatgtatcgagcaatttcctagttcaaagcagcatagttagaaaacccacaaaactcaacaaaaaaaatcccaataaaaagacaccatataccatctttattttacatcaagcaaccaaaacatcaggtagctactagattctgagttcaaaaagtatgttttttttttttatccgtaagaatcaaatacaggtaccatagagtttacaacaactcatacaccatgttcaagtaactaagctagacccccttggtcaaaaaataagtttttgcagcacttattttataacaacaaattgatgcaccccacagtgctagataaggacaccttcaattatattgatcctttgaatcagaaatcaaactacactttcttagttaatatacactttgcacgttttcataattggcagccactttttacatgttaatatacagtttccaaataagagcatgtgaatataatttaggacaaaaatgtttcttccaatagaaatcaaaaaatctaccaatgcaaaggtttgcttggttaaagttctcaaataaaagtccataaaacattgtgatagttcgtaaagagaataagccatattttttttttaaaaaaaaatgacattctatatcagttatgtaataaaggatgtagaaatgactatccaacatctgttagaggaaaattgatgtagaaaaggaacgttctacatcggttttagacaaaaccgatattgtaagttatattcaacatcggttttggtagaactgatgtaaaatagatgttgttagatgtaccacaacatcaattttttgaaaaatcgatgttgatttttgcatattttacattttttttgtttatttcttattatatgacatcggttttcttaaaaactaatgttgtgtagtgtatgttaacatcggttttttaaaaactgatgttaacattgatacttttaacgttggtggtttcaacatcggttaaaaatcgatgttgaaagtcgaaaacaatcgatgttaaaatcgtattttctagtagtggtttcaacattgggtttatatcttttccagcattatcatccaattttatcaatttactcctattatgtcatgcccaccaacacctagtgccagttgccatccattaaccatcatccaatcaagtccaaacccattcatattccataccacttaagttctttttttcaacctttcaaaaaaaaaaaaaaaacccatattttaaggaccttaatgataagttgcgcctttctaggcccaaataggttgtttttaagagtagatagttttgatattttccttttaatattcagttttattttatatttcctaaaaatactagattgtgctatttgtatggttggtattctttgtaaatccctatttaatagagtatgcactgtgtaagaaattatcaatgaagaatatcttttttatgtttatctcttagttttgatagaatgataggatttgtgatagaatagttatcttgtatctatcagaggatctgggtgggcacaaggtggaaggaagggagggtctttgtaatctaatttttgattattttgcaggtctttctgatggagttaatgatcattgtaatcttggtcttgacaaggttgatctgaaactcaatgtggaggaaaatgtaaggctaatccatcctttctcttttgagtagttccaagaagcagtgttcaatatggagccagactctacccatgggatggatggtttcagcctgacatttttatcaacatttttggggtacttgtgatagtggtgtcttctgtaatgcccaaaaatttcaataactgaaaatagacgtttgatatatttcttgtgttatttgattaatttagattagttgaagtgttgtgtgaattatccttgtgcaacttcttggtgtggatgttaggtaatatggagtttgtttgatctgtgttggaaatgtgtgatttcaagtttaacccaaaaatctatttcagtaaaaccactatcttagactcgttaaccgttgtagcttagcaacgcatgtcttcatgttttgaccattgagatttgtgatataacatttttggacatctcgcttaatgcgaccagtgtgctaagtgcaattccacacagaggaaaaattttcctcagcacaaaatttctcactcaccaccaaaagaagaatttctcttagcaaggtgagcttaataagcgagatctacagtttataaatacattcataagcataaaaaacacaatttccacctctctctttctctttccaaaccctcacctaaagccctagacatcctcctctaccacccacgatcacgagtcgtcgttgcttgccgtcggaccactgtacagagaggaacactttaattggagcgaaatattcaaaacccatctcgaggattcggtagagaatgaagctctcaaccctcctttcgtggtttctttgaggtaaccatgatttccttgtcttctcctagtttgtttaagcctctcttagtatctcttgtgatttgggtactgttattagatatttttacattttttgaaaaacctttgaaattgagacattgtaaaagttgtctttttataaaattgatgtcattttcgtgaccttccctgaacctcggtcacattggtgcaattaaaatttcaaaatgacatctctttgatgtagactccaaaaacaccattttagtcccttttaaaactgaatgggtatttgaccccaaatgttaatattaaccttgtcttcaaaatttatactgaattatctgtaatttggtatatagagctctacatttgaaccaaaggacgtgaacctgggagatctcaaaatagcgctgcaaggacctaacagagagatatacataggtgagagaagtttattgtttgtttacaacttttgataccatagttggggtcaggaaacccaattatgaggatgtacgtatgtccttgttgcgtgctggttttcaagaaaaaatgtgttttaaactaatgggatgcgatatatttgttattgatgaatcaaattgtgaatgattttgttgaagtaataattagaatttttgggaaaagtcttaattacagaggaaactttgtccaaaattttatatttgttcttctatttacttatttattaaattttaaatgggtataagagtttgttttatataccatagtccttctctttaatttataatttttctaaaatatcagtctcgtggtattatggattcttattgtaagagatttgttttgtctgaagacctggcatgaatttatatgtatatatatggaatgcgatttcttgtgatgatgatgatgatattgaaataagatgatgttgatgttgatgatattgatatgagatgatgttgatgttgatgatgatattgagatgagatgatattgatgttgatgttgatgatgacattgagatgaaatgatgttgatgttaatgatgccatcgtgatggatgtatactgtgtatgtacatcgggggtgcagtgacctgttggatatctaggagagggaaggagattgttttaaaaatttcaagcgtccctggagaggagaggaaaatgggattgcttataatttttaactatccatggttagtgcattgatggtgcccatgattcatacttcttaattgcatgaaaatagtataaactttgtcagtaagcacctgtagtttttcatgaggaaaaatgctggtacttggaggcatatcactcagcttgaaactcccttgagactagtgctaatcaacatgggggagggggttgccaatgtatgacagggtgacctcgacagttgttgcatagatttcctaagtgagagtgttatgtggacacacttaggctatttcctgacaatgatatcacattgcatttgagtgaagtcaggtgcatgcatcaatctgagcataattgatttgaattgtggaaaaagttgatgactagtttgttaagtgtatgttgaactaatgaattattgagaatgattgtggttatttttattgttttcttgctaatcattgtcatctgatatttgttgatcttgtataataaactcacccttgcaattttgtaccgtgtttttggtacctgggtgatcgtgaaccttcgttcatgggagcatatgagtagcagtagtaggtgtaacactgatagttgatcaaggtcccgtaagacctaagtgtagtattgattattgacaagggcccaataatacctagatgtaatactaataattgagcaaggtccaataagacccaagggtaacactaataattgattaggacctaataagacctatgtgtaacacaaatgaatgaccaagacccaataaaattcaaatgtaatactaaagattgatctaggctcgataaggttcaactattttctcaattatttttagtttttatcttatgaattatatagtaatataagcttatctttaactatgatatttttttttgaaaaatataaaaattcattttagaaacaaaacaaaaaagattaattgaaaaaggtaagggatcttcataaattcatataatctaataaaacaaattgataaaaaaaactaaaaatgtccaatcaaaatcactatagataaaatggcaaaagaaccaaaagggtgtttttttaaaaaatatttaccgataaggtgcgctnnnnnnnnnnnnnnnnnnnnnnnnnnnnnnnnnnnnnnnnnnnnnnnnnnnnnnnnnnnnnnnnnnnnnnnnnnnnnnnnnnnnnnnnnnnnnnnnnnnnnnnnnnnnnnnnnnnnnnnnnnnnnnnnnnnnnnnnnnnnnnnnnnnnnnnnnnnnnnnnnnnnnnnnnnnnnnnnnnnnnnnnnnnnnnnnnnnnnnnnnnnnnnnnnnnnnnnnnnnnnnnnnnnnnnnnnnnnnnnnnnnnnnnnnnnnnnnnnnnnnnnnnnnnnnnnnnnnnnnnnnnnnnnnnnnnnnnnnnnnnnnnnnnnnnnnnnnnnnnnnnnnnnnnnnnnnnnnnnnnnnnnnnnnnnnnnnnnnnnnnnnnnnnnnnnnnnnnnnnnnnnnnnnnnnnnnnnnnnnnnnnnnnnnnnnnnnnnnnnnnnnnnnnnnnnnnnnnnnnnnnnnnnnnnnnnnnnnnnnnnnnnnnnnnnnnnnnnnnnnnnnnnnnnnnnnnnnnnnnnnnnnnnnnnnnnnnnnnnnnnnnnnnnnnnnnnnnnnnnnnnnnnnnnnnnnnnnnnnnnnnnnnnnnnnnnnnnnnnnnnnnnnnnnnnnnnnnnnnnnnnnnnnnnnnnnnnnnnnnnnnnnnnnnnnnnnnnnnnnnnnnnnnnnnnnnnnnnnnnnnnnnnnnnnnnnnnnnnnnnnnnnnnnnnnnnnnnnnnnnnnnnnnnnnnnnnnnnnnnnnnnnnnnnnnnnnnnnnnnnnnnnnnnnnnnnnnnnnnnnnnnnnnnnnnnnnnnnnnnnnnnnnnnnnnnnnnnnnnnnnnnnnnnnnnnnnnnnnnnnnnnnnnnnnnnnnnnnnnnnnnnnnnnnnnnnnnnnnnnnnnnnnnnnnnnnnnnnnnnnnnnnnnnnnnnnnnnnnnnnnnnnnnnnnnnnnnnnnnnnnnnnnnnnnnnnnnnnnnnnnnnnnnnnnnnnnnnnnnnnnnnnnnnnnnnnnnnnnnnnnnnnnnnnnnnnnnnnnnnnnnnnnnnnnnnnnnnnnnnnnnnnnnnnnnnnnnnnnnnnnnnnnnnnnnnnnnnnnnnnnnnnnnnnnnnnnnnnnnnnnnnnnnnnnnnnnnnnnnnnnnnnnnnnnnnnnnnnnnnnnnnnnnnnnnnnnnnnnnnnnnnnnnnnnnnnnnnnnnnnnnnnnnnnnnnnnnnnnnnnnnnnnnnnnnnnnnnnnnnnnnnnnnnnnnnnnnnnnnnnnnnnnnnnnnnnnnnnnnnnnnnnnnnnnnnnnnnnnnnnnnnnnnnnnnnnnnnnnnnnnnnnnnnnnnnnnnnnnnnnnnnnnnnnnnnnnnnnnnnnnnnnnnnnnnnnnnnnnnnnnnnnnnnnnnnnnnnnnnnnnnnnnnnnnnnnnnnnnnnnnnnnnnnnnnnnnnnnnnnnnnnnnnnnnnnnnnnnnnnnnnnnnnnnnnnnnnnnnnnnnnnnnnnnnnnnnnnnnnnnnnnnnnnnnnnnnnnnnnnnnnnnnnnnnnnnnnnnnnnnnnnnnnnnnnnnnnnnnnnnnnnnnnnnnnnnnnnnnnnnnnnnnnnnnnnnnnnnnnnnnnnnnnnnnnnnnnnnnnnnnnnnnnnnnnnnnnnnnnnnnnnnnnnnnnnnnnnnnnnnnnnnnnnnnnnnnnnnnnnnnnnnnnnnnnnnnnnnnnnnnnnnnnnnnnnnnnnnnnnnnnnnnnnnnnnnnnnnnnnnnnnnnnnnnnnnnnnnnnnnnnnnnnnnnnnnnnnnnnnnnnnnnnnnnnnnnnnnnnnnnnnnnnnnnnnnnnnnnnnnnnnnnnnnnnnnnnnnnnnnnnnnnnnnnnnnnnnnnnnnnnnnnnnnnnnnnnnnnnnnnnnnnnnnnnnnnnnnnnnnnnnnnnnnnnnnnnnnnnnnnnnnnnnnnnnnnnnnnnnnnnnnnnnnnnnnnnnnnnnnnnnnnnnnnnnnnnnnnnnnnnnnnnnnnnnnnnnnnnnaggctaggtactgttgttgatttccaacaccctaaacccttcaaaaatctattaaaaaacaaaaaaacccagaatggtggcagtttagcagattcaaaaagcacagaaagccaatacgcgaaggaactgggaagggggggtctggtgcactgcaacatgcctggatcaggcatgttgcacagcaccattttggtaaataagaccccccgctgcaccggatttgtaaatagtttcgaaagcgcaccttatcggtaaatattttttaaaaaaacacccttttggttcttttgccagataaaattgaatttgcatctaataaaaacttatagacgtattttaacactatcatcttttaaaaaattaaaaaaagttgttatacaaatgtgttggatagaatttgtgttcaactccattttccacgtatgaagttaacacactgaatgaagaatgacatcttaaaattttagagggacaacgtgcaccggtcatcactgttttatttataaagaaaatttttgtacgaattccttagaaaaagtatgtgttcaaccttatctctcacatagattaactaatagagttaacatactcgaaaagcgtaaatttttagagaaattgaaaaagggaaaaaatttagaaggatcaattttaaatttcacatattttaaagagataaaaacatactttaccttttattttgttattttcttcttctaaaaatatttatagaaaattttatccacacattgatttagtaaaaagagcttgacttagagaacattacctttgaaggttctgattcttctataggtggggattacctctgtacaacaagagcaagaattgatctatcccaaacatcaaacagcagttgggaaatagaaccacaccacaaccccttccaaggcaacacaaatgaatatctctcataatatcacccaaacacctactacaatcttcggttgatagatccggtgtgcactgaacaagagcatacacactctcggtctcagacctagacaagctcgcattttttgttgcaaatttcttagtacccgtcgggccagcattcgctgcatcactaactgcatcactcaaggtgttggccaacaaccacccgtagcttccttccttcgtcgaattcattgttgaattgtaactcatcaagttgaacctaggccattcgtccatggtgaagaaaaaataacggttggagtaacaaagatgatttgcagttgtccgtgagtcaagtaatttgtaaacaatttatgagtctccaaactaatctaacttttggctaatgatcttctatgctttcactatcactcactgatggtgtattgaaatttttcaaatagcaagcacagggaccttggccatggtgcacatctccttttataacctcttcccatcaaagaggttattttttgatatccataaaatgtgggcatagttgctaaaaataagagataagattagcaacaacttattacaaagaaaaaaaataagggataaaattagcaacaacttattcctaagaagataagattagcaacaacttattcctaagaagataaggtgagtggaccaccttatgtgattttgacttagtcaagcaacataaaagaaaccaacattctcccacttggtccacatatctcatcatacactttagtgagaaataaaatacatgaatcatggtgatagttcctctaatatatacacgagtaaaatctttcatgtattacattgcattatatttcttaaacccatacaattaacttaatgaataaacccaatgtttattctaggtccaaactgaattgatgtttcttagaataaataattgtagatgcgcataaactaaataaaaaaacatcacaataaagtttcttaatatcattcttacaatgaaaatcacatatgggaaccaagtcccatcctttatacttgatccttaaatctaaatggtggcatgcccttagttaaaggatcgacaatcattaattcagtgctaatgtgttcaataaccactgtattatctttaacacgttctcttatgctagatacttaatgtcgatgtacttgctatgactacaacttttgatattcttagccataaaaaaaacaattgaattatcatagtatatcttcaatggtctagaaatggaatccataactctaagcccataaatgaaactcctcatccatacaacatgtgaggtagcctcaaaacaagaaactaacttagcctctatagtggaagtagcagtcaatgtctgcttgacacttctccaagacacaactctactggctagcataaaaatatatcccgaagtcatttttcttgaatcaatgcagccaacataatttgagtctgagtagccaatcagttccaagttgtcagtccgtctatacataaacatgtagtctttagtttcctaaaagtatctcatcactttctttgcaactttacagtggtctaaacttgggttactttgatatctctttaacactccaatcgcaaaaacaatatcaggtcttgtgtagacctgagcatacataaggcttccaaaagctgaagcataaagagtgttcttcatttgttcccgatcaagatcattttttgggcactggcttaaatcaaacctatcacccttcagaatgggagctacacttggtgaacaatcactcattctaaatctttccaaaactttgttaatataggtctcttgagacaaaccaagaacacctcttactctctctctatgtatcttgatgccaataacgtaagatgcatcccccatatcctttatatcaaagttcttagagagaaattgtttaaccacatatagaaaacccttgtcattggttgcaagtaaactatcatctacatataaaataaggaaacaaattttgttccctctaaccttctggtgtatacaatgattcataacattttctacaaaaccaaatgaagaaataacgtcatgaaattttaagtataactgacggaaggcttgtttcaatccatacatagattttttaagcttgtataccaattgctcaccctcagtagaggagaatcctttaggttgtttcatataaatctcttcctctaggtctccattgagaaaagccattttcacatccatttgttgcaactctaagtcaaaatgttcaaacagtgacagaatgatacgaagagaatcttacttagatacaaaagagaatgtctccttgtagtcgatttcttccttttgattaaatcccttggctacgagtcttgctttatatctctcaatgttgcctaatgagtctttcttagttttgaagattcatttacatccaatggcttttgcaccatcaagcaactgaacaagatcccagactccatttgatgccatataattcatctcatatttcatagcatcataccacaagtttgattcattaaaactcatggctagtgaaaatgtttgaggatcattttcagctccaatagtatagtgagattcctgtagatacaaaatcgctcggtgttgttgatttctttattctggtagatctccttaatgttgttacattatcttcttaaggaacttattgttcaattggttgatcaacaatttcttcttgctcctcatgaacaacttgatctactagattattagcaggttgtggatcttgaatgataggttgcacaacacccggttgagctggaatgctattattaaaaacaaccaatctaagttttgaaatggatggttgagtaactagatgatctttctcagaaacaaaatgtctggattgatcactcccactaatcaagtcattctcaagaaatttagcatttcttgattccacaatccttgtactgtgaaatggatagtaaaatctatatcctttagacctttcagcatatctaatgaagtattcactaatggtccttgggccaagcttcttttcttgtgggttatagattctcacttcagacgggcatccccaaacgtgtacatgtcgcaaactcaatttccaactcttaaataactcaaatagtgtctttgggacaaccttagttggaactcggttcaatatgtacattgccgtctttagtgctgataagtgccacatttcagtaaaattcatgttttaaatagtggcacttatctttttgatttcattaacttagcttataaatttccctaaacctagttaaatagcatctagtacttgtttttaagttgtttcggaagattaatccaatcatgttttgtattttgatagattccgtagattttcgaggcttccggataatcaaaacaagcaagaagggctcacatagcaagtatgggaggtgcaacaagcatttcaggcccagaaaccgacatagcccaaagctttcttcaacattaagactttaactcgcccaggcgaccaaccatagtgtattttgcttgcctgggcgagctacaagttccaaaaagataagttaagctggcccaggtgaccaaaacatgaagaaaatggtggcctgggcgagtgaagctggcaggaggcaaaaacctataaataggccacgaaaatggagaggaaggcatgccatttttggaggttttcctccctttcttgttccttagcttgttcttaggtttaggtacttaaatattaggtttaagtaggttaagaaagtgagagaagtgaggtttagcgtggaaactttgccggagagaagcgaggatgggaacgttcagcagcttcttccgagaggaggttctctccatgttgggctagcttcttaaaggttggatgtaatcttcttaaccctatacttcttttaatattcatgcatgaatcattctatttcttattggtagtttcatttcgtgcttaatgcttgatcctacttgatcactagtatcacgaacttaaatccgaagtgagactggaaagtaatcttagggtttgaactgaatgaaattactcgttacgttacgttgctaggaatagggcataatgtttcgattgcataaaagcacgcgattatagttcttaacgctggggtaatttacttaaatatgcgagggatcgatattcggtaaactatccttagaacttggatgcgaggaatcgattcaaggtaacttagtgtgaatcaataaagaatagacggtgatttatgcatggtaaatattaattgaatataggacgttaagaatggtgaaatccaatcccgctttctcataaatatattttcattttcgttaagtttagttagtttactttacttgcatcaacaaatgaaatatcattcgacctacttgtacatatctattcacttgtttaattttagttggattaactgagtaagctcaagtccctgtggagacgatcttataaattcgaaacttacaacgatagaacggtacgcttgccgtggtaaaaataagtaacaagtgcttcattccacaatgacttaggaagcttggaactactaagcatacttcgcaccatgtccattaaagttcggtttcttctttttgtcacaccattcttaaccggagaactaggcatagtgtactgggcaacaatcccatgttcttgaagaaagttcacaaatagacaaggtacttgtccattctctgtgtatctaccatagtattcaccacctttatcggatttcacgatcttaatatgctttccacattgtttctccacttcggccttaaaaactttaaaggcatctaaagcttcatctttagaacgaagtaagtagagatacatatatcgtgaaaaatcgtctatgaaggtgataaagtatttccgactacttgcgttcatgtctggacaacaaatatctgtatgtatgatttctaatagatttgagctcttatttgcactctttttagacttgttagtttgcttacccttaatgcaatctatacaagtatcaaaatcagcaaaatccaaagcactaagtacccctttatttaccaatctcttaattctctcaatagagatgtgttctaatcttaggtgtcacaacatagagaaatcctcattcataacacatcgttttgtgccaacattaacatgcatagcatcataagtggtatcattttgaaaattaatatagaaaagaccatatgcaaaccaatcttccatgtgttatgattaatcatattagattcataacaaactaaagaggtaggcatacttttcttttccaaaccatagcttgaacttaggacaatctttcttcatgtgccccttctttttatagaagaaacacctggattctttcttaattccaggttgaggtggtattttaccacttcccttgttcttatggcctttcttattatccttcctttcagtcgtcataagagaactctctccttgtttcaactgcaacctcccatctttctgaacacacatggtatgagttcattgatagaccatttgtctttatgtgtgttgtcggatattttaaagggaccatatggtgctgggagagtattcagaataaaatgtaccagaaaggagtcacacatgtccacctctagagtgttaagttgagctacaatttccctcatctacatgatgtactcatgcacaccctcagagtattgagcttcatggaagaaaatttcattattaaggtactgaccaatgccttccttgaagtctcaaattgttcattaatctacttcaggagaactctgacattttcatactgttcaactgagcccttaataccagcatatattttagtcttaatgaacatcacatagagtcggttggatctttcccatttctcatacagatccatctcctctggttcattgttctctataattgctggtggctcagctttcctgatagcataatcaatgttcatataccctaacgtcagcacaatcgttttcttccagatagaaaaataatctcctctcaattttgggcatcaattatattaataggttgtatagttgcaaaataattcaacgtatgcttcagtaaatttgagacaaaaataatgtattatgttttaccaacgtaagtcatgcttaataaataatgaatttagcgacataaaatttgcctgtgggctaaaattttaattcaattaaattcacataaacattatgataaaactatcaagttatatttcttgacccctgtaggcaaataaaaaaatataatttaatattttatcctaattaatcatacaaaattttaatagaaatgtcaatgggataatatctactatattatatatgactaactacaattaatatcatctatcttatgtgatctaaaaactcttaatatataacataaataatnnnnnnnnnnnnnnnnnnnnnnnnnnnnnnnnnnnnnnnnnnnnnnnnnnnnnnnnnnnnnnnnnnnnnnaataaccctcaggaccagcgcgtctggtgtgaagttcagtgctagaagcgctaaggttttctgtagaattttctgcagaaacctgatgtagaagtgcggcgcgatcagcgccagtgtggcgctaccagcgccatgcacactgggaactggcgtgggtggcgccaggttcgcgcgatcagcgccattgtcactggaagatggcgtgagtggtgccattgtttctggatggtggtgcggttggcgcgggagtggcacggatggcaccatgggttctggaagctggcgccagagtggcgcgattggcgcgacatgtcggtcaggcccagtatataagggtcaagttacaaaattgtgggccatttttccatcttnnnnnnnnnngtgatctaaaaactcttaatatataacataaataataaagttgttgtgactaagctttaattaattaaattacatagatcactaatattatctttgtattattgcatcaaactccaagcaataatgtcaaataattaaatatcacgaaataataacttaaaaagtgtaacaattaattacaatattatgcctaattccttatatgatctttaaacaacttaatatataattttaatcaaattatagatattgtgactaatccaggattaattaaaattataaagatcccttagacataaaacttaatcatatgagaataaatcatattatacacttaaaggatcaagatataatataatgatgaataaaattctcatataaaattgcataattgaaacataatattatgcatatatatatatatatatagaataaacttttgcagaatatattcatgcataaaacatatcaaaactctacaaatttcaaannnnnnnnnnnnnnnnnnnnnnnnnnnnnnnnnnnnnnnnnnnnnnnnnnnnnnnnnnnttaacttactgtaattaactataaacaataaaattaaataatcaatcattcagattaatcaacttactattacacgtataggaaaacataaattaatatatgtaatgacaaaataacaataaattatgtgaacatatatcataaaattgtcattaatacagttggcaaaatgctttatagccatttatatggttacaggttcaattccctttgaaatccatgttttaatttaatcatgcttatacacatacaacataagtaattagaacaagtgcggaaaaattaagatcataaatacctcccgccattgctattcttgttcaattgtttactccgaagatgatttgcggttgtccgtgagtcaagtaatttgtaaacagtttatgagtcttcaaactaatctgacttttggcttaatgatcttctatgctttcactatcactcactgatggtgtattgagatttttcagatatcaagcataggaccttggccttggtgcacatctcattttataacctcttcccatcaaagatgttttttttatatgcatttaatgtgggcatagttgctaaaaataagagataagattagcaacaacttattccaaagaaaaagataagggataagattagcaacaacttgctcctaagaagataaggtgagtggaccgccttatgtggttttgacttagtcaagcaacaaaaaagaaaccaacaaggacaccgtgaggctatttgttgggtcgcatttgtgatgcatttttggcacgtttggttggtgacatcgccatggcacatgaaggagccgtaaatggttatctttcgttgtaatcatgtcgtcattgtcgccgccgccaccaccagatttgctgttgtagaattatgtaatggtggcatgagaatatagggttatgaggagggttttgaggttggattggtaggtgctgtttggattgaaggttctgttaattaattgaacagctgtggttcaggtaggtaaggtcacttgcatgggctatggaaacgttgaagtagcccaaaaggaaaaggtaaatgagtaaccacatgttatataccacacggtcatttactcatttggtacatgtttgtgttgagtaacataatatatataggcgaataattattagggtgtgtttgtaaaatatttggacccaacaaggaagagtctcctttctagatacctaagaaagtgtgaacatctattttctcatctctcaacaacaatcctaagagagtgttcataagtaacaatacttcaggccattaaattgtcaatgaatgacaaagacttgcttacattaatggtttacctgtcccccaagaaatttataagtataaaggtagggaaataagtactttagtttgaacagaaaacctacaggtaactatttttccacgaattgaatattgattgttgtgcacgtttatactcctagttattttttcttttttatgttttgttatatagctttaaatttttttgtgtgtaaatatacaccttttaaatatggcatttttcagtcgaataacaatatgggaattttttgggcggaggcagattggagtgtacaagaggaagggtgtggcttacttgattacaaaattagttataaatcgttaaacttattcctaaattactaaacatcttgttacggattcaatatatgggcctgaaagtgttaattacagaaaggcccattaagggtccaatgcttcagaatcttaacagcaattaaggatatctaaactatgcacgtaccaaccactcaagagtatcacaacaaataaagatcttgatctcaacagttagagattttagcctaataaaccgaaagaatgtatcagcatgcctagaggtaacttacttataaataggggttatattcatggagaaaggtacacgttctctctactctacttttccattatcactgtgcacacacctcacctccattggctggtattaaagtgcatcgtgatcaactttcccaaaggtatttctcccataaataccttagagagagcttttgatccaacatcaacatactagcaattctgctagacacccctattcatttaaacagaacattggcaccgtctgtggggaaccgtaaatttcaaatcccacgttcatgatggtaaacacgagaagtaatcagacaatacacccacgttccgatgcaggtgaaagaggagaattacctcctaatcctgtaatgcagggggcaaatcaaaacatggtgaattatgacgctgtgcatgttagtgaccaggttgcagacatgacctcttctctagctccgacgacacaggcagcactagatgcttattgtttggatcaaactcgttatctagcagtaattgcacctcctaactcggagcccactgagcatctcatgaacaacgtcctcagttcaatcttggcccgaatggaggacatggaaaaaagatatgctctccaaaggcaggaggacattagaagtataatgctccagataaaggagtgtaatgcagcttggaggcatgaagaagaacaacgcatgcagttcatggagcagcatttcaggaatatggagaacccagttcataatgggaaccgtagacagcagattcgtgatgtggccaggaatgtgaataaccaacaggacagtcaagtcccagttttcccaacaaattggcatgcgaatcccagagacaacatgatcccggattcagaaggaccaactagtcgattagagactgggggtttgtctagagggaatgctgcaggtccatcccgatatcgagatgacaatctggtatatcccgatggaacatggcccgtatacaagctatagttccacaccaacctaccaacgcagaagcaaaccaggcaactcaagtccggatcatgattccagacgttcaggaacctgcaacagaagtggcacctcgaacaagagtcaatggaggagtttaacggaggaaatacagtagaggacaacacaacaatagtccttttactgatgaaattgtcaatgctcgatacttagaagattttaacggttcctttttgtcaaaatatgctggaagctaggatccacaagtgcatatcaatgaatttgacatgctgatgtgtgttcgaggaatcgatgagctgatcatttcacgaatctttgttactactttatctggagctgtccagacttggttgcatatgttgccaccgcgatcgatctgcaattttgaagattttggacagaaatttttgttgaattttgccaccagtaaaaaaaaactaagtctgaatttgcacttggtaagatacgacaacaaccggcaaaagaaccaaaagggtgtttttttaaaaaatatttaccgataaggtgcgctttcgaaactatttacaaatccggtgcagcggggggtcttatttaccaaaatggtgctgtgcaacatgcctgatccaggcatgttgcagtgcaccagacccccccttcccagttccttcgcgtattggctttctgtgctttttgaatctgctaaactgccaccattctggtgtaagggtttatggttaatgatttactgtttatgttggttaggttgatggggcaggcatagtagtccttgccataacgtgatttgatttcgcaagagtcatagcgtgatttgatttcacagatagatgacaacccttcttgttgggggggtcagcagaaagccaactgtgagcgggcgggggtccggggaagccgccccggcgggggtccggggggcagcgcccccaggcccgtagaggctaggtactgttgtcgatgtccaacaccctaaacccctaaccacaaactatcgtcatatgagcgtaccctaaacacaacctaaccatgcccagcaaaccctaatccctcaaacgcgaacataatcagcacttgaacgcatgcttctcgtcactcaaaacatcttcaaaaatctcttaaaaaacgaaaaaataccagaatgatggnnnnnnnnnngtgccccaaagattcttatccaatgcccaatattgatcagctggtagataactcatccaggttttagttattatcttttatggatgcctactcagggtataatcagatacctatgtatctggaagaccaataaaaaaatgacctttataggtgacaagacgaattattgttataatgtcatgccttttggattgaaaaacgcggggggccacatatcaaaggatctgaacaaggtatttgagcaccaactctgccgaaatgttgaagtctatatagacaatatgattgtgaagacagctactatggctgatcacatacaagatttagaagagacattcagcaagccaagggagtataacattcaattgaacccgttcaagtgtgcattcggtgtttcggctgacaaattcttggggttaatgttaacctacagagggatagaagccaacctggacaagtgtaaaatcgtgttggacatgaagttcctcgcaaacaaaaaagaaattcagcaactgacaagaagattggcggctttaacgcgttttctcccaaaatcagcagaaaaaacacttcctttcttcaggttacttaaaaaagaggctacggtagcatggaactcggattgtgaggctacgttcaaagaaataaagaaatgtttggcttttccacctgtattgtcgaaactagaacctggggaggtactaatattgtacttatctgtgggagatgaagcagtcagtgcagtattggtgagggaannnnnnnnnnacaccagatttgtaaataaaggccctcctgcaccggatttgtaaatagtttcgaaagcgcaccttatcggtaaatattttttaaaaaaacacccttttggttcttttgccgacaacaacccggtgtataataaccctcaggaccagcgcgtctggtgtgaagttcagtgctagaagcgctaaggttttctgtagaattttctgcagaaacctgatgtagaagtgcggcgcgatcagcgccagtgtggcgctaccagcgccatgcacactgggaactggcgtgggtggcgccaggttcgcgcgatcagcgccattgtcactggaagatggcgtgagtggtgccattgtttctggatggtggtgcggttggcgcgggagtggcacggatggcaccatgggttctggaagctggcgccagagtggcgcgattggcgcgacatgtcggtcaggcccagtatataagggtcaagttacaaaattgtgggccatttttccatcttcttctttctctgagcgtccagactccatgggagaacttccaagcttactagaccctcatttcttggcctaaacactttcctttgagcataaatcttgtgaggaacctttagtgagctataatccttcatctttttcttcttaaaaaccccttaatttgataatccctttctcaagggaaatccattgaactcgagttcagcaaggaacggcatcgattcttggacactcgagctaggggaagcggtccacgagcctttcttgtcgctttttgaagtaagaaacttaagtttctctggctgatttgtgagttgggtgttttggggtgaatattgacccacttatgattgggctagaattagccttgggtcctttagaaaagtgtgtttggaatgtggttaggatgaaggattagctcttatctgttggttttggtgaactttgtttaggggctctgattatgcatgtgtgactattgagttgagtcacttgttgatgttaagacatgcaagagccttggtacatggtttgggggtgtctgagaggccatgtgaacggtgtcttgtatatggactgaaccgttcaagctataattgaatttagagtaagtggactattgagagctttgagctcattatgctgggcttgttctgagtctgtggtgactctgatgccttggttgagctgagatagaccactgagggtctatgagatgcctagtaagagttgggccatgatgaaccttaagctagaagacagagagagtttaatatggaaaggaagagtgtttccttttatataaacgattgaaaaccgttactgattgtttatctgcatgcctgatgtagggcgtgagattcatactgctggtggtggtcaccacgaggccgggagagccggtattgagctgagaccaggtaagcacatcgttcttgggggatgtttcccttgcttgtgtttcaccacacccaagagggtgatggtttggtatgccatgcatctggatattgtgtgttgttgttatactgagacatgtatgtggtggagagagaaataccattatggcatgatgatgattgatgttagctaaacacggtgatagtgttatgctttgtattggttataagatgaatgttatgataatgctgtgtgatgtggttatatgagaattctctggccagtagaatagggaactatggaccccttgggaatgtgcccttaattggatgatcttccttgggacaatccataggtgtccatgtaattcctgagagaatgtgcccttcattggatgatctttctcaggtatgggcaggaaaagccctgagggaatgtgcctttaattagattatcttcctcaggcatggatagggagagtcctgagtgaatgtgcctttcagtagatgatctcctcaggtactcaattggaagtcatgaggaaacgtgcccttttatggatgatctctctcaggcaatgtgtgatgggtacatatgttgttaccctgtactatgacatgcatgtagtgagttacacgtgagccgtgaaggctaattgtatgaatgatattatgtgatattaattatgttgtttatgtgattagaagtgaaccagggggagggcaacctccaaggaccctgagtttactgagatcattatctcacccctgttggggctcatgttgcaggtgatgatacaggagtagctgatagatcccaaggcaagaggcctgagcagggatagtcttgttgataaatctaggcatagatgactgagcatgttggctcatttttttttgattatgcctgtatttgtatagttttgagaaagtgtatgatgtaaaggacagaaattcaccatatatgtatataatgtatattgtttttaaatgaagcttccattactgtattatgattatgcttgctgcgttattctgatataataataatgttaatacgccgggtgcacatggggtattacattttatggtatcagagcagtgtacagggaagctgtatatatatacatatggtgaattatatgtttgttactaaatgttttgggtgttcactatgactattgcatgtgtgatatttgagtgtgagcctgatcaagtcaccctgtcatgtgatatgtgcagtgtcatggtgagaacctggaacactagagagatggtgggtgtagagaggcaacccgacccgattgtagctgctttggcagctgtgcagcaggaacttgctgcaagtagataggctaatgaagccctgttaaagactaatgaagagctcatggctgagttgagagctcgacgtagggaagatagagtatcccctacacagcatactcctgagggcgagggtagtcgccatcagggtggaggtagccatcactctgatgggcctcagcaccagagaggggacaggtcgtcccaagctaatacagaagaggattcagtcactagaggaaggatgcttattgccttccgtaagcatgatcctccatccttttatggggagtatgaccccattgcggctgctaagtagttgcaggcgttagagaagattttcacagtgatggaatgctcagaccatcagaagcttctctatgccacttatttgcttcagggggatgctcatgagtggtgggttaccacctcacagctgttgagaggccagggtgaagtcatcacctggcaggtatttgaggcacagtttctggaccgatacttccccagagatgctagagagcagaagcaggctgagtttgagagccctgtgcaagggaagatgtcagtagatgagtacttggccaaattcaatgagttggctaagtatgctcatttcaggagggctttacctgaagcagaggttcttgccgctaagttccagaggggacttagagagaatatagaagagaagattgctggcagtggatcccgagatctgggtagcctagtgaggcagtgccgccaggtagaggacatgatcaggaggcgtagtggaagccatcctacttcctctgagaggcaggaggcgaagagatctagtggatcaggccctactgggaagggcaagggccgagtcttggggatttcttctccagtaggtagattcaagaagggctccagtcagaaaggagtgccacacagacctggtccacctcccaagtgtaatacttgtgggaggaaccactggggagtgtgccccactgggcagttggtctgttacagatgtggcaagcatgaacactatgctagagagtgcccacaggcaggcagtcgggctacagctgccccagtgatatcagcagcacctacgaccggtcgggtttatacagtggatgctggagaagtcgccagagctcctgatttgatcagaggtattattttgattgatgtttttgatgtgagagtcctgtttgactctggagctacccattcttttattagtgatcgcactgctcaaggactgaacttgcctatgttcagacttccttctcctatggaggtcattactgcctctaaggagcaatgtagagtgaatatgtgttgtaaagatgtgcatttctagtttgagggcaaagaatatgctgttgatctgtattgtttggcgatgcctattcttgaggttattttgggcatggattggttggccaagtatggcatcatgctggattgttgtcataagaaggttgtagtaccttcagatggagttagcccgagttctatttcattcctcttggtcatacaagtccgcaaggaaataaagagaggggctcagggctatcttttgctgagttcagcagttgagaaaccggggttggatatgtcaaagattccggtggtgaacgagtttgtcgatgtatttcctgaggagatcacacagcttccaccggataggggaattgaattctctatcgacttagttccaggtatgggacccatatccatagccccttaccgcatgtctcctttagagttaaaagagctgaaggtgcagcttgaggacttgttgtccaagggatttattagaccgagtgtgtcaccatggggagcaccggttctttttgtgatgaagaaagacgggagtatgcgtctgtgtgtggattacaggcagttgaacaaggttactataaagaataagtatcctttgcctcgcattggtatgccatgcatctggatattgtgtgttgttgttatactgagacatgtatgtgatggagagagaaataccattatggcatgatgatgattgatgttagctaaacacggtgataatgttatgctttgtattggttataagatgaatgttatgataatgctgtgtggtgtggttatatgagaattctctggccagtagaatagggaactatggaccccttgggaatgtgcccttaattggatgatcttccttgggacaatccataggtgtccatgtaattcctgagagaatgtgcctttcattggatgatctttctcaggtatgggcgggaaaagccctgagggaatgtgcctttaattagatgatcttcctcaggcatggatagggagagtcctgagtgaatgtgcctttcagtagatgatctcctcaggtactcaattggaagtcctgagggaacgtgtccttttatggatgatctctctcaggcaatgtgtgatgggtacatatgttgttaccctgtactgtgatatgcatgtagtgagttacacgtaagccgtgaaggctaattgtatgaatgatattatgtgatattaattatgttgtttatgtgattagaagtgaaccagggggagggcaacctccaaggaccctgagtttactgagatcattatctcacccctgttggggctcatgttgcaggtgatgatacaggagtagctgatagatcccaaggcaagaggcctgagcagggatagtcttgttgataactctaggcatagatgactgagcatgttggctcattttttttttttttgattatgcctgtatttgtacagttttgagaaagtgtatgatgtaaaggacataaattcaccatatatgtatataatgtacattgtttttaaatgaagcttccattactgtattatgattatgcttgctgcgttattctgatataataataatgttaatacgccgggtgcacacggggtattacacggtgaaacacttcagagttatctggaccatttcaaggaagcagctttgcaagtacagggattggaagaaaaagtacatgtccatctcatttctgccgggttagatggatcatctcgtttggcgaaatcaatttattaagacccggtgaagtcattgttggagtttaggactcgatcaaagaagtatttggatctagaacaaataggcagagaaaaggaaagaagtcccaaacgaaggagtccacttcaaagaggcaggcaacaccacgggggtcacaaccaaggcaggaactcggatgtcaagttcaggcgaggaaaatataaggccaagtacgaaaatatactccactaaatgcatctcggtcacaagtctagagagaagtagctctaaccgacatgaaaaaggtggaacaacctcgtccgttatataataaagtcgaggtagatcaatcccgactctgcgaattccacaacggactagggcatactactgaccaatgctgggatctccgagatgtgattgaaaagtttgtttgagagggcaaattgagataaagaagatactgccaaccaaagaaggaagtataaagaacatgcgtaaagatgggggtcagaacaaaatccaacccgggggcaaattgagataaagaagatactgccagggtcgccagaacatgcgtaaagatgggggtcagaacaaaatccaacccaggagagataaagaagataaaagaaaaaagcagaacgataatggagatgagtttgtagagcccgagttcgtttgcaatgtcatctctggagctttgggaggaggaggagatactgccaaccaaagaaggaagtatctcaaggaagttctttcactgagagaacaacccaagtttaaaggcaagaataacaggacagagccttccgtgctctatttcacggaggaagagatgaaagatgtggttctcggtcatgaagatggcttggtaattaccagaactctggttaattttcaggtcaaaggatgtttgtagataatgtcagcttcatagatattattctctggaacacgtttaaaaagatgaatcttgacaaagaagatttgaagccatgtaaaacaatgttaataggattgaatggggaaaacactaaccctaaaggttctattgaccttcggatgaccttaggcaccaaggaagcgtttaaatcagaacgtgtcacgtttgttgtggtcaattttccttcaccgttaatgttatcttaggaaggccaactatccacaagtgggatatgttgatatctactaaacatcagaagataaaaatgcttgggaacaaagacaaagtggtgacaatctgcagagaccagaaggaatccctgcagtgttattataacatagtcaaggatagtgagggtggcccatcttcaccaccccagatacgtcaaggggatccgaatagaaggaaaatggaggaacgccaatcgggaaaaccagtgaatatggtcgagcttgacatgagggaagatgccgaggactggagaccggaaccaacaagagatttggaagatttgcaaatagggtatcagccttagcaaatcaccaagattggtaacacggtcaactcggccaccaaagccaaactcatggagtgcctaaaaaataatcaagatgttttcgcttggaaaacattggaaataccggggataaatcccaatttttgttgtcataagttgtcaatatatcccggatcaaagcctgtggcacaaaagaagaggaagctcggtccagaaaggaaaaaagcactggatgaacacattaaagagttattggatgtcgggtttatacgagaaattcaatatactacatggttatctaatgtagtgatggtcaggaagtctaatggcaaatggcgagtgtgcacagattatactgacttaaataagatgtgccccaaagattcttatccaatgcccaatattgatcagctggtagataactcatccaggttttagttattatcttttatggatgcctactcagggtataatcagatacctatgtatctggaagaccaataaaaaaatgacctttataggtgacaagacgaattattgttataatgtcatgccttttggattgaaaaacgcggggggccacatatcaaaggatctgaacaaggtatttgagcaccaactctgccgaaatgttgaagtctatatagacaatatgattgtgaagacagctactatggctgatcacatacaagatttagaagagacattcagcaagccaagggagtataacattcaattgaacccgttcaagtgtgcattcggtgtttcggctgacaaattcttggggttaatgttaacctacagagggatagaagccaacctggacaagtgtaaaatcgtgttggacatgaagttcctcgcaaacaaaaaagaaattcagcaactgacaagaagattggcggctttaacgcgttttctcccaaaatcagcagaaaaaacacttcctttcttcaggttacttaaaaaagaggctacggtagcatggaactcggattgtgaggctacgttcaaagaaataaagaaatgtttggcttttccacctgtattgtcgaaactagaacctggggaggtactaatattgtacttatctgtgggagatgaagcagtcagtgcagtattggtgagggaannnnnnnnnnactaaatccatattctgatatgaaaaatattaagctgatgctgacgtggcgcactaatcttcagtccataaattaattccaagcccaattaattattaaactgccctgaaaatagaaattaaaataattaacttaaaataatccaaattaattaaaatccgacttatcgatctaattaaatcctaaatgagaaacagtgcaaaatataaatatttaaacataaattagggattaaaatgagaataaaaagatgagtaaatagtgataaatagtgactcatcaaaaccccccatacttagccttttgcactcctgggcaaaatcaaagaaatagagcaaggaaaaaaattctaaaaactttaaagaaagtatgacacaccataaaacaatcagttatgcacagtcctcaatgaaaactgggaaagagaaaggaattgacaatttccagcacacaaagagtcagagaaactacacacttatgagattcatccaagcattcaaaacttatcaaaacaatcaatccgctcaagaggtgaattaaaagcaacagaacctcaccagatgcactgtatcacacactgtatctctcaaatgtttaggcaattgtatactctcaaacactcatgaaaacaagcaacagatagacttggcaagcctctataatcaacacccaataaacatgcacataaggatcaaaaggtcttttcagggttgtaatgtggccaaggacatgggagaggataaaatatggaataagcagctgcaaaccagagggactagaggagcaatggggaataagtaagaagtaagcacagaaacaaacccaaaaatctctaatgagcctctaacaccattccttttcctttgcttcaaacaaaatagcttttcttcaatttattattttttctttctttcatttctatattttttcttttttctctttcttttatttttcttcttcttttttttttttttttactgannnnnnnnnntgccccaaagattcttatccaatgcccaatattgatcagctggtagataactcatccaggttttagttattatcttttatggatgcctactcagggtataatcagatacctatgtatctggaagaccaataaaaaaatgacctttataggtgacaagacgaattattgttataatgtcatgccttttggattgaaaaacgcggggggccacatatcaaaggatctgaacaaggtatttgagcaccaactctgccgaaatgttgaagtctatatagacaatatgattgtgaagacagctactatggctgatcacatacaagatttagaagagacattcagcaagccaagggagtataacattcaattgaacccgttcaagtgtgcattcggtgtttcggctgacaaattcttggggttaatgttaacctacagagggatagaagccaacctggacaagtgtaaaatcgtgttggacatgaagttcctcgcaaacaaaaaagaaattcagcaactgacaagaagattggcggctttaacgcgttttctcccaaaatcagcagaaaaaacacttcctttcttcaggttacttaaaaaagaggctacggtagcatggaactcggattgtgaggctacgttcaaagaaataaagaaatgtttggcttttccacctgtattgtcgaaactagaacctggggaggtactaatattgtacttatctgtgggagatgaagcagtcagtgcagtattggtgagggaaacaaacaatgtccaagtgccagtctattttgttagcagggctctccaatgtttcgagttgagatatcaaagattagaaaaggtagcctttgcattgttggtaacagcaaagaggcttcgcccgtacttccaaggccatacaataattgttagaactaatcagtcaattaggcaagtgatacataaaccagatttggccggaaggatgatcaactgggcaatacaattgtctgaatttgacttgaaatacgaagcccggcacgctatcaaatctcaagcgttggatgatttcgtcttggaattaaccccggttaatggaggaatgaaagatgatgtttggaaagtatatgtggatggatcgtctaatgtcaagggaagcggagccaggatcataattgaaaacccggaaggagtagccattgagcaatcccatcagttaaacttcctgacatctaacaaccaagctgtgtatgaagcactgatagcggggctatcgtaggcaaaagaacaaggagcgaagaaactaaaggtgcttactgattctcaacttgttacagcccagattgaggggcggtaccaggtgaaagggctattgttggcccaataattgaataaggtcaaagaaatcatgctcgaacttgatgaagtcgttgttagtcatattcctagaggggaaaattccagggtcgatgttttgtcaaaatcggcaagcactaagagtccgggaaatcataggactatcattcagcagaaggtctctaggccgagttgcataatgataatctcagcagctgaagattggaggaggcctatgattgactacctcgaaagaggaatcttgccatatgatgttatagaagccaagaaattggtacgtgatgtggtcatgtacacgattgtggacgatgaattgtaccgcaaagggttgcatactccgatgctggtttgtttaaacccgaacagagttgactatgtattgaccgagatacatgaaggaataaatggccaacatatgggagccaaagcattagcaaggaaagcccttcgagctgggtaatattggccaacaatggaagctgactctatgagtcacgttaaaaaatgcgaaagttgtcagaagcatgctaagataatatggtccccgcctgttgagttacaatctatctcggttccatggcccttttttaagtggggaatggatctattgggaccattcaaggcagcagaaggacaactgaaatggttggtagttgcagtggattatttcataaaatggatcgaagcggaacccgtttccaccataacatcagctcaggtgcaaagatttttcgaaagaaacatcatttctagatttggtatcctgggagaaactgtgacagacaatgacactcattttatcgacaagcggtttcaagaaatgatggtcgggttccatatcaaactccattttgcttcgacaaaacacccgcaatccaacgggcagaccgaagctgcaaataaagtgattgtagacggtttgatgaagcgtatacaagaagccagctctagttgggttgaacaactgtattatgttctataggggtacaggaccaccactcaaacgtccaccaaagaaatcccgtttagaatgacatatggttgcaaggcaatgataccaattgaaattggtcaaccatcctggaggagaaagaatgttcttcaggaggaagaagaaaagaacaacgaagctttggccgttgagttggatttggcggatggagtctgggttagtgcacattgccgggagttagcggtaaaacagctgacagtcgccaagtacaataagagagtaaggcttcgaacttttgacaaaggtgaattagtgctccgacgagcggatatcggaaacaaaaatgtcagagatgggaagttagcagccaactgggaaggaccctactgagcagccaactgggaaggaccctactgggttctagtgaaactcgaacagggatcctatgtgttggaaacccttaaggggaaagaaataaagcgaacttgaaatgcagataaacttaaagtgtattacagttaaatctgggtccaatgttttgtcacaagctgttactttttgttaagatcaataagccgtggtttcaacaaaatattgatttattttcctttgttggatttgtaagttgtaattcaaaaatcatgttgtttctcttttattgaggccatgagtcgttttatgacaagttcgtaacctggaaatcatgttgtgtctctttcattgggatcatgaaatgttttacgacaagagtttgtaattcggtaatcgtgatttaagatcatgagttgttttatgacagtttataaataaagaaattttgcctttattgtgatttcgcaaggttataacttttgtctatggtacggaacaacatgcaaatttagtaaaaactttcgcgtaaatgatgcatcaaaattattatcgtggcacaagagaaatatgctatgtgaaccctgatcaggtcgaaatgtaggaatgtttgattagaaaatccaatttttacatgtagcaaattaatctgtgtcacgattaagttcaaggatgataactcgaaacatgttgcaaagacaagtttttgcctaataaaatacctgttcgttgaaaccaaatgaatatttatgcagactgtgaaaaatatatttgattttggccaaatcaattaacagaacccgatgtagtatgggttcatacgtgtgattagaaccttgaaggggcgatagcacaaagaaagaaattaagccaatgattgttaaaaataaatctgggaataagcccaacaatttcaatacagatttaaaaagagaatcaggtcccagcataaagaaaaaggaaaaattactaatcaaaaccagcatcctggcccttcatcaattaagcttcccaggattgagcttggtcgccaacttgatcggcaggtgtcatctcctcctctccacgggtttgaccttcttccatttcagtcattgaatcttcgcaaggagaaggaagggacattaacttgccatcactaacaaatactttaaagtgcatacctgaagtattaagttcaatcccgggattcaaaaggtgaatctgctccagcgcattattaaaggacccctccacggctccgaaaagctcagaccttacatactccaactttgcatcattctgattctgcttccggatttgcttgtcatacaactcggttaattccttaaaattcttgttagtgacaacattccttttctgcaaagaatccaaatcagatttcaaatttgccgcagtactttcatccttttctgttttgctttgagatacaagcaattcttcgcagatcttctctgttacagcacgagatgcttgcagctcttccgccgcaatgctttgaactacaaggagttcctcatgaatcttttttgtttcttctcgggccgcttgaagctcattgaccgttctagcatacctggtattcacagtcgataaactatgaaccaggggcgcacacttcataccattaagctctatacagttgagctcttaaatgtcagccttcgagaagagaactaagtcctccaagcatttgggcgtgcgaacaacgcggaataattcatcagtaatacccttatcctagagggaaccgggtaataatccggttgtggcggaagcagaggtatctggagctggtggaggggtgagtggttggggtgaggttactgttggagtaggtgcagccggagtaattggagcatcatcccttcgggcctcgaagacaggtgttgggatagaaactacagtcttacccttttgggcctcagaaagctttcgcttcttcgatccaggacctgtggccgcggaaattttccctcacaccaaagcgttgagaaaagaagggggttgagatcgcctcgatggattattggaggccgaggtgggccgggccgctttctcagcaccggaggccagatttgaaagcatcacttgcttttgcatatcagcaactgcgaaagaaaagcaagcaaacagttaaaacaagcaaagttatgtacaaacatagcacaatggataaaatcgtactcgattgtgtgagaataaaggaagctacattaggaggaccatgagcttcctgataggaaactatccaggttatcgagaaagcgtcaacatccgataaatccgtctcctcgaaacggtaggatgaaggaggaaggtcgtgatgggtgggggaccagtagagtggaaattttcattccatgtccctagattcgggagaacaaagaaaaaaatgttgtttgccggattcaacaacaaacttgaagtatttattcttaaagcttttgaaagaatctgtatataccttaaagagcttacgctctgtatgaccccggatggaagtccatccttttctattcgggggtttctacccgtcctaccagtttgtacagtaaagtaataaaagaaaggggaattgtacaaggaatttctaaatagtcacaaacacgctcaaaagctttcatgaagccccaactattttggtgaatttgtgaaggggccacatgaagatgattcaaaacattcatttgaaactcggataaaggaaattggatccctatccgggttattacatctttgtagaaaaagaaaaaagaaggatcattatcttccctcaaagagcaaataggctcgttcttagcagggggatgtatgacgaaattttcctgttccccaaccagaagtgcggcaacgtcctctgagctaaccttggacaacgtccgcagaacctcatgaatcacccacgggaattagaggacagagcagaaggaggggaacccggatgtgattcggcggattgagactcgacaacttgttccaatgacgggtctataaatacctacgtcaaagaaataatgatcagtaaagcagtgacatacctgaagaaatattgggtaggcaggaaaaagagtttgttgaagtggaagttgaaaatataatgaaaacttatgcaaataaccaaaagggggggggtgaattggttttacctcagagtttttaaaattcctttgaaaaatgttacagcgaaagactttcaagaaggatcatatctttaaaaacaattaagaaaacaattttcttcaccttcaccttaatcaaaccactcttgtgctgtgaccaatcttgtgatatgaacaaaacttaatacttcaagaataatatgaacataaacagaaatattcaaacacacagaatttatactggttcacctctcaaccccggaggctacatccagttttcttctaaccaaaccttggtcagagttccactataacaaatataatatctttacaagcttacaatgatctcttttaccctccctaggtaaaattcaaaatctaaacctataggcttttcaaaagatcaagaaccagagattccctctctgttcttccctctagaaacccctctagaaaaagctttaaagattacaatttgttataagaacattcaatacaaatacaacacaaaatataaataaaaaataaccaagcttatagttcaagaaagatatcacctcttattcctcagtaaattcaatgaaatgaatgatctaaccagactgagaatgtatgcaattgatctttcttgatgacttttttaatcagaaaacttgaacaaaacttcacatcatgtagacaatgactaacatatcatgtaaaactccatgactcttagcatcttttgattttctaatctccctcttgcttttgagttttaagaaatctagaaagtgattttctcaagtcttatacgaaaacttcacaaaatatttcatttttaaactcagtgcaagttgttatatttataaaaaaaaacatacttaactaattgtaattgattatttcgtcaatttaatcaattattttaactgatgtaatcgattatttcaaccagataatcgattaaagtattcatcaagaatctggaaaaatgtcaagaacaaaataatcaattaagtcatcatgtaatcgattattgcagatgacctgagttttataatacacatgtgtaatcgattaatttcccaaataatcgattatcacagacaatgtgaaaaactcatcaatgcatattcaattgattacgaatatctggtaatcgattaaaccatatgaaaatgcatttgtaaaatatgcagtgactcagataatcgattattcagtgatgtaatcgattatcatagagcacgtctttttcagtgttcagcacatttaatcgattacgaatcaatggtaatcgattaaaatattcataaggcaatatgcagatccattcacatgcatttaatcgattatatcatatatgtaatcgattaaaatagtgaaacacagtttttataaaaatctaattgcctttatgactttacctctaattacttattatcatatgattaaacataatttaatgtatgtatgaatgcatgaattaaacaagattagtgaggattatgaggctttaaccacttgaaccaagcttaagcaagaaattacaaatgccatcaattgagtgggcatgtaaaacatcaaaagttgcttcttcattcttcttaattccatatcttcctcatagctaacaatctccccctttttgatttgagcatgccaaatacttaattgatggacattccttttaggaagagatgtttatcctgaaaatttctcaacttttgcaaagaccaagtattatatccaaaacttgatttttacttaaacaaattcatcatccattcataacattcagacattcatcattaggtgtattgttgtgtcttgtgttgtatctgagttgttcttctgcctgggcacaatactctaaatatatagtagctgtctaacctaaaagaatggacttttcctaacagttttagcccaaaatcactaaagataagataaaataaaataaaaacgaaatccatattctgatatggaaaatattaagcctaaataaaataaaaacgaaatccatattctgatatggaaaatattaagcttaaatcaaataaaaactaaatccatattctgatatgaaaaatattaagctgatgctgacgtggcgcactaatcttcagtccataaattaattccaagcccaattaattattaaactgccctgaaaatagaaattaaaataattaacttaaaataatccaaattaattaaaatccgacttatcgatctaattaaatcctaaatgagaaacagtgcaaaatataaatatttaaacataaattagggatnnnnnnnnnnaggagcaatatggatttgaaaataaccagaaaaaccgtcaaggaaacaataatgagatttacctgccagacgctcaagcatctggtcaatgaatggcagcggaaaatgatcttttcgtgttgcttggttcagccttcggtaatctatgcagactctccaactgttttgcactctggttggaataagctcatccttgtcattctttacaacagtgaggcctgtcttttttgggaccacttggactggactcacccactgactgtcagagataggataaatgatcccagcctgaagaagcttggtcacctccttcttcactacgtccagaattaccgggttgagtctcctttgaggttgtctcacaggtttagctccatcctccaatgatattctatgcatgcaagtggatgggctaataccggatatgtctgctagggtccatccgatggctttcttatgctttttcagaacttgcaacagcttgtcctcttgatcggcatcgagggaagtagaaatgatcactggcaacttctcatcattctccaagtaggcatacttgaggtttttcggtaaaggttttaattctggattaggttgatcagaggtaggaatcagggatggaagaagaatgggttccacagcttgtacctcaacctgcaagtcagattcttgtgtacctcctgaaacatggttagtgtattctgactctaaagaatttaaatcaagaggtataacacccaatacatcagaactagcatcaaaatgggacatatgttcagattgaaaatcaaagctggattcattatcagattcatattcagattccatgcatgcaagagaagtataaagatcagatagaaaacattgctttgtagcatgggaagaataaaaatcagaaacatactcatcaacaacatcatcaagaatctcagcacggacgacaaaatgattttcagatggatgtttcatggcatcaagaatgttaaaatgaacaacaatatctccaaactccatagtcaatgtaccagcatacacatctatcttagttcgggctgttttcataaatggcctacctagaatgagggggacagaaccatgggaaaatccctcctccatatcaagcacataaaaatcagcaggaaaaattaattcaccaaccctaactaagacatcctcaatgaaacctgtagggtatgcaacactcctatttgctaattgtatcactacaccagtgggttgcaaaggaccaagagacatagatttaaaaatggacagaggcataacntttctgcccatgctgactctctcaattccagtcatcttcctcttcctcttattagtgcacaactccttcaagaatttggcatacttcggaatgtgcttgatggcatccagcagaggtatgttgacttctactttcttgaatatctccaatatttccttgtccacctcttccatctttttgtttggaatggatctaggaggaaatggaagagggatggaagactgctgctgcacatcagaactggtgctagaagaaggttcacctgcatgaatttctcgagtaccaatcgaatcatcatcttggtcatgtactggtacaggtgcagggactgaaactggtatagatggatgtgagggcactgcagtaggtatgtcaatctgttttcccgacctcaatgtgatggcactcatgtttttcggattctgcacagtctgagaaggtagtctatctgaattttgtgactgtgcctgattaagctgagtagccatctgccccatctgattagtcagactctggatggaagctctggtctcttgttggaattgtaaattctgaagggtcatctgcctcactagctcctccaatgaaggttcagaagtagaaggttgagaggctggtggtgtaggcatatcattttgttgtctctggtactgctgctggactagtggaggcacataaggtctgtttggactagaactttgaaatggtggtactggaggctgttgatgttgctggttgtttgaccatctgagatttagatgatttctccaccctggattatatctgttactggacagatcataattctgctgttgttgttgaggtctattgttataaatgtttgcagaataagcttggggagcatcagggccaacaggttgctgcagagagggacatgcatcagtataatgatcatttgaagtacaaacaccacaaactctggcaacagaggcagatttttggttaacagcaagttgagtaactaaattaaccaaagcatctaatttgccctctaatttcgtagctgcagctgaagaagaaggattagaattagaagctacatcatgaactccacgaatcacaattgcatcattccttgcactgaactgctgggagttagaagccatcttctctatcaaatgtctagcttctgcaggagtcatatcaccaagtgctccaccactagcagcatcaatcatactcctctccatgctgttaagtccttcatagaaatattggagaagaagctgctcagaaatctggtggtgtggacaacttgcacacaactttttgaatctctcccagtactcatataaactttctccaccaagctgcctgattccagaaatatcttttctgatggctgtggtcctggatgcagggaaaaatttctccagaaacattctcttgaggtcatcccaaccagtgatggatctaggagcaaggtaatacagccagtcctttgccactccctccaatgaatgtggaaatgcctttaagaaaatgtggtcctcaaggacatctggaggtttcattgtggaacaaactatatggaattccttcagatgcttatgaggacactctcctgcaagaccacgaaacttaggcagcaaatgtattagtccagttttgagaacatatggaacatcctcatcaggatactgaatgcacaaactttcataggtaaaatcaggtgcagccagctccctaagagtcctctcacgaggtggaggttgagccatattattctcagtataaaaataatcagcagaatcagaaatagtatgcacagaattaatgctagtagcagaaggagaatactcagaattcaagctaacactatctaaggttacagaatctaatgaaatattcctagaatgcctaactaatctatggtaagtcctgtctatctcaggatcaaagggttgaaggtctcctggattgcctctagtcatgcactacaagcaacatatcaagcatttggcagacaagcacaaagagaggtaaaactagagctacaggcaaacgaagtccaaatgagctaaaatttggtgagcaacaccctaaaatcatgaaaagacagcataccaaatttcaagacctaattcaaaggataactaattaaaacagattaagcaaatatggaaaaataggaaaataaaacttcaaaaataaaaataaaatagaaaacggcctctttttgaagatccgacggtcgccaggcagcaaagcagcctgggttggatagatcttttttttctaccccaaaaacatgtataatacgtcaaattctgannnnnnnnnnnnnnnnnnnnnnnnnnnnnnnnnnnnnnnnnnnnnnnnnnnnnnnnnnnnnnnnnnnnnnnnnnnnnnnnnnnnnnnnnnnnnnnnnnnnnnnnnnnnnnnnnnnnnnnnnnnnnnnnnnnnnnnnnnnnnnnnnnnnnnnnnnnnnnnnnnaaagaagttaccacacaaaaattcacgcaaaaataacaagtctagctatcaaaacaaaaaatcgcaattaattcaaaaaaaaatggttactattcattactattccttgcgactgtgcttcttcctagtattgttccttgcggtttcttgttgctgcggctggtatgcgtggctgaatatcctaattgctcctgcagaattgatcaacacaaccaaatatacaagaaacgaaaatttgaaacacagttataacaaaccacaattaaaaatatcaaacttgaagcaacaggtcacaattcgaattttttttttttaatactaacaaaacacaagacaaaaacaaaaacacacgcacacacaaaaacagaaaaacccttaaacagaactgatgatccccgaaaacggcgccaaaatttgatcgcggccgtacgcaaccaaattaattcagtttaaatgtagtactaggaaagtgactcctaggtcgtctctcaaggatcaattgtcaatgttcaagggattgaaaacgtgttgggggggtttttggcagaatgcgagaattctaaattaaacagaatgtgaaaactaaattaaacaaaattaacaattaactgcagtaattaaaaacaagtcagacccttagaacagattgcgcctctaatttccttggttcacgaaagataaattgttctacttaattctcatcagtccagattaatcaactaagcgaagattaatctaaaacgtcattacacgaattaagcaaacgtgaacctcgttagggcaaactctcagaattaagcaaactgagaatactgaatcaatcaatatcaaaatcattaagcatgactctaattcgaaaaatacagaacagaaacccaaacaaggaagaacaagcagagaacgaattagaagaacaagaacctccattaaaggtctgcaatctgtcctagggtccaaccctaggtttagccttccattaattcgaaattaagaacagaaatgtaaattgaattgaaacgcaacattaaacgaaactaagaacaaaaacgaaatagaagcagaaagtgaaaacgaaattagaaggagtagacagaaaacaaaattaaacactgaattgaaacgcaattgtatattgaaaaaaacagaaatgaaacagaaaacaaaagcagagaagcagaaaacgaaaattaaatattggctggtgtattgttgtgtcttgtgttgtatctgagttgttcttctgcctgggcacaatactctaaatatatagtagctgtctaacctaaaagaatggacttttcctaacagttttagcccaaaatcactaaagataagataaaataaaataaaaacgaaatccatattctgatatggaaaatattaagcctaaataaaataaaaacaaaatccatattctgatatggaaaatattaagcttaaatcaaataaaattaaatccatattctgatatgaaaaatattaagctgatgctgacgtggcgcactaatcttcagtccataaattaattccaagcccaattaattattaaactgccctgaaaatagaaattaaaataattaacttaaaataatccaaattaattaaaatccgacttatcgatctaattaaatcctaaatgagaaacagtgcaaaatataaatatttaaacataaattagggattaaaatgagaataaaaagatgagtaaatagtgataaatagtgactcatcactttacctctaattacttattatcatatgattaaacataatttaatgtatgtacgaatgcatgaattaaacaagattagtgaggattatgaggctttaaccacttgaaccaagcttaagcaagaaattacaaatgccatcaattgagtgggcatgtaaaacatcaaaagttgcttcttcattcttcttaattccatatcttcctcatagctaacaatctccccctttttgatttgagcatgccaaatacttaattgatggacatgccttttaggaagagatgtttatcctgaaaatttctcaacttttgcaaagaccaagtattatatccaaaacttgatttttacttaaacaaattcatcatccattcataacattcagacattcatcattagttcaatcattattagctccccctgagttaaacattcattcttattcccttttatatatttatcaattatcaattctatctcaaatatctactccccctatttggcataccaaattaaaaataacagaagtagataaaatagaaaagtaaataggtgaaattcattaatcataatcaagggtagtacaaagcataacataatcaaacataaacaaaacaaaagaaataaaaaaacttaaacaaacataaccaaatcacagaataaaactagaactaatccatatctctagattcatccctaaagatcttacactctatgttcttcatcctagtcttcaattcttccaaagatgaattcacttcatctctttgttcatgaagaagggaaaataatgcatccatcttttgaatcatcaaagattcaaactgagaatagtgtggttcagatggtgcaggctcatcttgagcttcctcagtagctcacagctgatgtccttcttcatcacctccttctccttcttcctcagccaatggcacaggttggcctgccatttgccaaccataaggagtcttcaccatgccaagctttatgaggtgcttctccttgatttggccgttgcttgagttggtatgatccatgacttcatttgacacatccacttgaaagtaatcaatgaatcttgaaaccaaaacagcataaggaaaaggatagtttaccaatctttttgatttctgcataatttcttgaaggattaaaatccagttcagcttgattcctttcttcaagccatagacaacttaagatcatcatctgttgcttaagcatgattggtagaccttggtgtgaggatgtaggtgattatgtaatgtaaaagtatgtcctcatgtgtcatgggacctgtgctcagccttaatctcaggttcatgtgaggatcaatgagcatgcttctatatgtctacatcttgttgtatccttcagcttcctctttaaatcttctctctccatcaaaggagataccagcaacctcattccatatctttagtgtgatttccattgcaacaccattgacttgtgtaaggattgttccatgcatggaaatcttggagcaggtatagaagactttaactaagtcaagatagaatgtgcctttcatttcaacaaactttgttaggccttgttgctctaacaattgtggaaactgaaatccttgttgggtaaaccaagcaaggctcaagaattagggtggacagagaagcttggtagcattgaactgtaaatagttcattttatcaacttcattggaaaacaaatgatcaagcttattagtgacaagattagaaggctgggcttgtgctttccttttggaggtttttacctttttggaagtagacatggtgagggtacgaatttgaagattaaagaatgaaaataacctcttaggataagagaatttcagagcgaaatagagaatgagaaaacagagtatgaggtgtgagatacccacttcacaaattcattatttataggcaaattgaaggttgtgagcagttgagaatgtgaaaaatatagctgttgtggccttaatcactcacataatggctttgattgcatcaaatcgtgcttaatagcagttgggcagtttcaaaaactgtcagattctacagtaaccactgaaataatcgattatttcacttatgtaatcgattatttcacttcaaatattactactcagaaatgatgtaatcgattaaaatcttaggtaatcgattatatcagagcaaatggcttgttgaagataaagtgtaatcgattacaatttgatttaatcgattaagacagagtgagatgaaattttagacaatcaggatcagaataatcgattatttcgatgtagtaatagattattccagagaagtttagaattttgaaaaacacagtaacttcatgtaatcgattaaatggtcgatttaatcgattattccagagtgaacatgatttttctggaactcgaaatgagaataatcaattaattcgatgatgtaatcgattacaacatctttgacttgtttataagaagcatagaatgaccaaataattgattaaagctttatggtaatcgattatttcagcttttatacaccaaatattgattttatgcagcaaacaatatgtaatccttatatcaatttgagttgctatttttcatacaatgtctaaaccattcataatcaaagaaagtaaacatagaaatgtcacttaacatgtactagattcatccaaaattccaagcatatttcttaatgtaaagaatctatcctcatccaaaggtttagtaaagatgtcagccaattggtttttactatcaacaaattcaattttaatgttacctttttgtacatgatctctgatgaaatgatgtcttatttcaatatgctttgtcctagaatgcatgattggattcttggagatatttatagcacttgtactgtcacatagaagtggaatttgttgaagttctacaccaaaatcttggagttgttgcttcaaccataaactttgagcacatcaacttccagctgatatgtactcagcttcagctgttgacaaggctacacaagattgctttttgcaatgccaagaaattaaagagcttcctaatagatgacaagtaccacttgtgctctttctatccaacttgcatcctgcaaaatcatagtcagagtaaccaattaaattgatttttgtaccttttggataccaaagtcctacttttggtgtagactttagatacttgaagattcttttcactgttgtttgatgagactctttaggatttgcttgatatctagcacataagcaaacacttaacataatgtcaggtctacttgttgtgagataaagcaatgatcctatcattcctctatactttgactcatcaacactttttcctctttcatctgaatctaggtaggtggaagttcccataggagttgttgcagctttgtaatttttcatatcaaacttctttaacatttccatacagtactttgattggcttaggaaagttccattcttcatnnnnnnnnnnagctctgtgttacagaattagcttagtaaaattgttttggtgcgtgtcgacaacgtgttatcatcaggtctacttgttgtgagataaagcaatgatcctatcattcctctatactttgactcaccaacactttttcctctttcatctgaatctaggtaggtggaagttcccataggagttgttgcagctttgtaatttttcatatcaaacttctttaacatttccatacagtactttgattggcttaggaaagttccattcttcatttgtttaacttgaagtccaagaaagaatgtaagctctcccatcatagacatttcaaaatcattttgcatactgactgcaaattctttacacaaggagtgattagtagaaccaaaaataatatcatcaacatagatttgtaccaaaagtatatctttgtttcttcttttgatgaacagagttttatccacttctcctcttgtgaatgattgatcaagcaagaacttacttaacctctcataccaagatcttggagcttatttcaatccatataatgcttttcttaatttgtacacatggttaggatattgatgatttacaaaactaagaggttggtcaacatatatttcttcatcaatatagccattaagaaatgcacttttcacatccatttgaaacaatctaaagttcatcatttatgcatatgcaaggtgtaatcttatggcttctagcctagcaactggagcataagtttcatcataatcatgtcttcctcttggttgtaaccctttgcaaccaatctagctttgtttcttattatgatgccactttcatccagcttgttcctaaaaacccacttagtgctaataggtgtgtgagtggtaggtctaggtactagttcccaaacattgttccttttaaactggtttaattcctcatgcatagcaattaaccaatgttcattaataaggcttgttcaatgttattaggttcaatttgtgatacaaaagccatagtgcaacaaagatttcttaaagaagatctagttgatactccctttgacacatcaccaattatgttgtccaatgataagtctcttgtggttctccaatctttgtgtctaggtgtggctgtttcttggtttgtatcttctattgtttcttcttcttccagcttactagcttctatgtgctgctgtctttcttctttgttttctgcatcattgtcactcaaaacttctacatgataaaggttagttagtttcatcacatactatatgtacagactcttcaacacacaaggttctcttgttaaagaccctaaaagccttactttgcaaggaatatcctagaaagatagcctcatcagcttttgagtcaaacttaccaagattatctttgtcattgtttaaaacaaagcatttacaaccaaatgtcttaaagtgagagatgtttggtttcctccctttatagatttcataaggtgttttctttaaaataggccttatgagaatcctattaagagtataacaaactgtactcacagcatttgcccaaaaatgcttagataattttgtttcatttagaagagtccttgctccttcttcaagtgatctatttttcctctccacaacaccattttgttgtggtgtttttggagctgaaaaattgtgattaattccaaaatcttcacataacttttcaaagtgttcattttggaattcaccaccatggtcactcctaattgaaacaatattacaacccttttcattttgaattaccttggcaagtttcttaaaagctgagaatgcttggcttttggatcttaagaacaatgtccaagtgtatctagagtaatcatcaactataacaagtccataataatttcctcctaagctcatggttcttgagggaccaaataaatccatgtgaagcaattcaagaggtctagaagtagaaatcatattcttactttgaaaagagtttttagtttttttccctctttgacatgcttcacaaattttgtcatttttaaacttaagcttaggtagaccaattactaagtctttcctaattaacttgttgagatgatgcatgtttatatgagatgttcttctatgccataaccatgtttcattcactttactcatcaagcaatcaattttatgtatgaatgcatggtcaatagacaagacataaatattaccctttctcttactaatgtgtgccactttgccatttttaccatcatgtatcaagaaagtctcactgttaaaggtgactttgaaacctttatcacacaattgactaatgctaagtaaattgtgtttcagcccttcaacataaagaacatccttgatttttgcagataagctatctccaatattcccttgcctaattattctgcctttattattgtcctcatatgtaacatatcctctttcttcaagtacaacatctgttagcatggatatgtctctagtcatgtgtctagagcatccactatctagataccaaattgaaggttttgctctaagacacatctgcacaaatcaaattaaaaagagaaatagggtccccaatttaagttggatccaaaggggttagttgctttctttcttttctcaacccaaatacattcaccattaggaacataaaatcttctagcaaagcacttgtatgatgtgtgacctttaagcatacaataattgcaagtaagagattttgatgttctaacttgagtaaatctattgtagttatttgattgattgtgctgcatatgatatttatgttttggtggtacaaacacaagcttattttgggttctagctccatgtttatatcccaaaccataagtatcaccagcaaatttttgcacacttagtaactcatctaagttgcatttgcctttgtaatattttcttagcaaatcaaccaaatagctatttttagtttgtaagcacacgttttcttttcctttactcagcttataatcatcaaattctttttgcaattcattatattcatcaaccttagagttggctaaggaacatgtacatcctttctctttgtaacttgagagaagcttatcatgatcttctttcaatgtacaaagctcttcttgcaattcagcaagcttcgatacatgtcatcttagatcactcttaagcttgttgtttgcttttgctagcttttgagcttctaaatgcatctcatgaaatgcataaactacattctcaaattcagaatttacctctgattttgtacttgataattcatattcttcattaatggtatatgtaaggcataggtgagctttaacttctttttctgaagaggattcagaacttgttgattcattatcctcccaagaaatgtaggcctttttaggctttccttcccttctagatctcttctcaacttgtggcttctcttgttgttcttgttggtgttgtcattacttttcttttgaaatggttgctttctacccttattcttccttagaaacttggaaaactttcttacaatgagattcatattctcatcatcatcatcatcttcacttgaactatcatctttttttatctttgaaggtgcagcttttaatgcaatgctcttatgctttttatctgcttcttcagcatttgttagttgagataattcaagctcatattctaaaagcttaccaaacatagctgccatagacatttgtgatagatcctttgattcattaatggctatgactttaggttgccaatcccttgttagacatttgagaattttgatgttcagctcttctacatcaaaagtttttactagtccaatcaagtgattcacaatgtgggtgaatcttgtttgaagctgagttgttctcatcatctctcatcttgaacatttcatattcatgaatgagagtgtgcttccttgatcttctcacatcatcagttccttcatgtgtgacttcaagtaattcccacatttctttggcacttttgcacctaacagtcttgaaaaattcatcagaagataaagcagaagttatcatattttttttctttgaaatcatattgaaccattttcttttctatttctgacatttcatcccattcttttggtattgttttgccatcaacaatcttggttggaatgaaaggacctttctcaatacaattccaagcacccgggtcatttgattggataaagatttgcattctgttcttccagaagttaaaatgttccccttcaaataaaggtggtctgttcaatgaggctccctctttgaaagttatttgattagtattcattgtcaaggattttgaaaagatcttaagcaaattacaagaaccagctcttgatgccaattgaaaatataatgaacacttatgcaaataaccaataggggtgaattgtgtaacgcccccaatttactaatcaaggtcattactaaacatacacaacaaacaagcatataatcaatcagagtttaagcagtttggaagcataactaggagtgacataatcaaaaggtcactgtcatcagcactgtacactataatatggtgaatatacatcaaagttccactgtacaatacaaaactgtacaaatatcccctcagggtacatcaaaacaaaatcaaaacgagtctaagtacaaaaccacaaaatatctgagcacatgctcatatcctctatcctaaggtgttcagcagcatctaatcctgcataggcctcttgccttgggatttctctgctactctggaagaatcacctgcaaaacacagccccacacaaaggggtgagatataaaatctcagtaaactcagggcccttgaaggtatttccttcccctggttcactgacaacaaaacacagacagaaacatcatcatcatcatcatcatggttataatcaataattcatctaatcaactcataaccagtcaatgtacaaccatctgtcaatatccacatgatttcgatggtaatcaccatctatcacctatcatcatcctgcggaggctttcacctaggcatatatgccgatccaacccacagaggatccaatatatgctaggccatctcatggcaggacgtcactatctatcaccatcctgcggaggctctcatctagttatatatactagaacatctcatggcaggaagtatcagaggcacctccgagaatatataggtacaaccacgtctggaggactcctatataccgggtcaacctctatcatgagctacaactcatatctcaatacaattcgcctgaggaggctttatccgtgaatataagaccatctcactaaggaggctatctttatatcacagaaacatctcatgtcaggcctatctcaatcacatgtcctctatcctattaccataggatttcacaatcaatcatgcatatatttagctaaataatcatagctatgcatcacaatcgcccatcactgggtctagatcagatcacaacatcacaatcattaccctctcatagggcacaatcatccaccgtcagtcaatcagaccactaatcaatcaaccacataggcataaaagcacaacagaaccatcacccccccttaggagtgtggtggaacacagtaaaggaatcacaagcaagaaccaagagcttacctgctctaggcaaatcaccggctctcccagtcccgtggtcaacaccacctgagctatcaggctcacgtcctacatgagaacaaagatatatcacatcaaacacggttctaaaccgttcaaacggaaagaaactctcattctttccatcatcacaacactatcacttttaagtgatcatctgaccctcaacaggatccctctcagcctatacaaggctacagagcccccctacacaagctctgatcaactatggccaagcatatctctgcttacaatggcctaactccaactcctcataatgatcagtttcaaccgatcaaactcacctatacagtctcatgagcaactttgtcaattgctctaagatccaaactagtcaaatagtcaaccttttccatctgcatataccgactcagagccaaaatcaaacttcatcactaacgatgattcaaggctctaacttcctcagaataccttcctgagcataagactccacagagtccgagcctaacaacggctctaacacctccaaaaacacccctcaagattaccccaaaaccccgaaatccaatacatagaaccaacgattagagctcgggtttcttacctctgtgatgttcaaaaacaccagggaattgctttccctaaggtagcttgctcaatcaaagcctcctttgcctctgggtctcaagctctcaggggttctctcagggaaatcaatctcactattcctcaccttttctcaagaatcaatcggggtatcttacttatctcgaggttctaatcactttctcagttgggtccaaggtgtttagatgagctgtggagaagctacgaagctcaaggaatcaacaatggcttccctctctctcttccctcttttctctctctctccttcagccagaaatgcccttttataaaacaaatccgtcgatcccgcgcggctcgcgccataacccgcgctactcgcgccacttgttcgggcctcccacgcgatgcgcgtgaaccttcacgtgactcgcgtggagctccagagaaaacatggttttctggggcacttctcacgcgatccgcgccagataccacgcgtgtcgcgccagactctcggccagcccacgcgactcgcgccattcccacgctactcgcgtggcatggcagaaccaatctgcctatcttgtgcatatggcgcgactcgcgccatactccgcgaggttagcgccgtaggccagaaccagttttcttatcttttcctcaagccttcctctaattatactaagcctcatcatttatctttaagcatgggcttaacctaggcttagttacgtacttaaaattcaaggtattacaaattggctttacctctgagtttttaaaattcctttgaaaaatgttactgcggaagactttcaagaaggatcgtatctttaaaaacaattaagaaaacaattttcttcaccttcaccttaagcaaaccactcttgtgctgtgaccaatcttgtgatatgaacaaaacttgatacttcaagaataatatgaacataaacagaaatattcaaacacacagaatttatactggttcacctctcaaccccagaggctacatccagttttcttctaaccaaaccttggtcatagttccactataacaaatataatatctttacaagcttacaatgatctcttttaccctccctaggtaaaattcaaaatctaaacctatagacttttcaaaagatcaagaaccagagatcccctctctgttcttccctctagaaacccctctagaaaaagctttaaagattacaatttgttataagaacattcaatacaaatacaacacaaaatatcaatcaaaaataaccaagcttatagttcaagaaagatatcacctcttattcctcagtaaattcaatgaaatgaatgatctaaccagactgagaatgtatgcaattcatctttcttgatgacttttttaatcagaaaacttgaacaaaacttcacatcatgtagacaatgactaacatatcatgtaaaactccatgactcttagcatctttggattttctaatctccctcttgcttttgagttttaagaactctagaaagtgattttctcaagtcttatacgaaaacttcacaaaatatttcatttttaaactcagtgcaagttgttatatttataaaaaaaaaacatacttaactaattgtaatcgattatttcgtcaatgtaatcgattattttaactgacgtaatcgattatttcaaccagataatcgattaaagtattcatcaagaatctggaaaaatgtcaagaacaaaataatcgattaagtcatcatgtaatcgattattccagatgacctgagttttctaatacacatgtgtaatcgattaatttcccaaataatcgattatcacagacaatgtgaaaaagtcatcattacatattcaattgattacgaatatctggtaatcgattaaaccatatgaaaatgcatttgtaaaatatgcagtgactcagataattgattattcagtgatgtaatcgattatcacagagcacgtctttttcagtgttcagcacatttaatcgattacgaatcaatggtaatcgattaaaatattcataaggcaatatgcagatccattcacatgcatttaatcgattatatcatatatgtaatcgattaaaatagtgaaacacagtttttataaaaatctaattgcctttatgactttacctctaattacttattatcatatgattaaacatgatttaatgtatgtatgaatgcatgaattaaacaagattagtgaggattatgaggctttaaccacttgaaccaagcttaagcaagaaattacaaatgccatcaattgagtgggcatgtaaaacatcaaaacttgcttcttcattcttcttgattccatatcttcctcacagctaacagaagtatcatccaagataaggacaatgttcctggaactgttggcattcaggggaaggtcaagaggattactcggcataagattcatactcaaccgggcagggctcggctttgggatggggatcgggttgtgacgatagcacccgagtactaaatcagccgtggagtcgagcctggacttcaaacaataggtactttcaataacacagtcgacacatggctggaatcagatttcgaaggaaggatctgaggtaaaatccttttgttctaaagacgattgcggattttgcgggtcgggatttagggccaaaaataaagaacatttaaaggaggttctagttctacgtttgttctgattttggtccaaggaaatttggtttttagaaactttagttttcgttgttttatccgacccaccagtatgtgagcgaaacatggccttttctctttcttcttcagaaaggggaaaatcaaagaaccaatacccaaccctaggggaaatggtttgccgcaattttgcttcttcctcaggagaaagtttcatattaaatgggaaaatagggggtttacaagaaaggttgatagacgaaagtagcaatgtgggtaatcagaaaagaaaatacaagaaattattcgagaaggaactcactttaagcgagaatggaagaaacgacgcaagaatgaaattacaatgagaagaaccaacaatacacgaaggaaataggaaggaagaaagaagtttatggtaatgaagatacctgatttgtgagagtttctcgaaagtttcggtggcgaagtgttgcgaatgacagcaggaaggacaagcaaaatgtagagagagataaagagataatacgaaaacaaataagaagatacaagtgaaaacaaaatgatttataaagacagagagggatgataacgcaactgtcaaaggcacgaaacgtcatgactgtataacagtcaggcacgaaacgtcatgcatagggagtaaatgagacaaatcagcttaatgtttgggggcaaaaaagacaaatccattcaaacgttgtgatggaggcgtgtcatgaagcgacagtgcattaaatgcgtatgtaacgcactacagctaatgaaaggacataatggagtaactttatgaaagatgtttcccatcctggatgtcacatcacgtagtggtacttgcatggtgtcacttaaggcatgagtaaagaaacaacctggtacaaagcaatgctcggataaggacagtcaggagtaacccggcatatccctatccgattgacatattggtaaataaagaaatctacagagtcattgtgtgcatcccaactagaattgcatagattaatacatcccaactgtctagagaccttgacaaccgggctggggggcaactgttacggattcaatatatgggcctgaaagtgttaatcacaaaaaggcccattaagggtccaatgcttcagaatcttaacagcaattaaggagatctaaactatgcacgtaccaaccactgaagagtatcacaacaaataaagatcgtgatctcaacagttagagattttagcctaataaattggaagaaagcattcctagaggtaactcacttaaaaataggggttatattcatggaaaaagatacacgttctctctactctacttttccattatcactatacacacacctcacctccattggctggtattaaagtgcatcgtgatcaactttcctagaggtatttctcccataaatacctgagagaacttttgatccaacatcaacgtactagcaattctgctagacacccctgttcatttaaacataacacatcttattttcttgtttttatttatttttacataaattacctttttaatttaaaaattctataactgaacacattgttgggtatcgcagaccctcaaatatcaaattgcggaaacgaaaataaaatcaaaagggagcgagagagacaatcagaatttgttttacatgagaaaaccttcctcaatgtgagaaaagaaaaaactcacgggacctagtccagtatcaaaatccactataacaaatcacggttacaatgaatcaaaaacacaccaatggtggtagtacactcaacctctccaacaatggtggtcactcaaacgctcacagtgtttcactctaagctctcaaatatgcaagcacaggggcttgctcaacaatggcactcaagactatcacttgaggctctcaattttctgtgtatcttgcctccacccttactcatctatttataggattaattaggtttacaatggactgggcctaagccatcaaatattatttgatttggtcaatcaaataaaaacagaaaatattaatcaaataaaaatggaaagtatcaatcaactaaaaacggaaattatccaacaaatcacccccttccgtttttcaatgagaccgaggtcttcaacttcaacaacccggccttctttctcagcttcatcagcctagctccttcacagtaatcttcaaatttccatgctggtatcggcttggtcatcatatcggactagttcaaatcggtgtgcactttgccaagtgcgagctgtccggtctcaactacatcccggatccagtgataccttacatcaatatgtttggtacgggagtgataggtcgagttcttcgcaagatgaattgcgctttggttgtcacacatcagctcgtacttttcttggtcatggccgagttccatgaggaacttcttcatccacagcatctccttgcttgcctcggttacggcaatgtactcggcctcggtcgttgaaattgccacacacttctgcaattttgattgccaagagattgctcctccagcaaatctcatcaaatatccagtcgtcgacttccttgagtcgggatctccccccaaataggcatccgagtagccttgcagctcggcttcaccttctccaaatcggaggcatagattggttgtacctttgaggtacctgaagattcactttactgcttcctagtgatccttgtcgggattcgatagaaaccggctcaccacaccaactgcatagccaggttgggtctagtgcaaaccattgcatacatcaagcttccgacagcagattggtacgggatcttcaacatctcgtctttgtcttcatcagacctcagacactgccttttactcagcttcatgtgcccggctagggggtgctaactgtcttggctttgtccatgctgaatctcttcaagatcttctcaacatacttgtaacaccccggacgtctccggcatattatcatcaatgatattcataacacgctatcagcgttaactaatcgcggtgcggaagcgatagaatcgtttttcttgattacattatgcatggaatacaaaaaaaaaaaaccacaccacaaagaacataaaacaagcccctgctgatccagataaaacataaacaactatataggcagatgacataaaacataactcagataatcaggaggaaacatattctataccatccacatcatatgtacatatacatgctcaaaaacaaacccacagctgggtcatacattagaatatgtacagaaaaatgggtatacacataccctacaactacacagagatcctaagaccaacttcccccttgaagctctactctggtcttcgactgcagcctcccatccagcctctcaggtccactagggcctcctgccctgaggtcgctcctctcctcaagaagcacctgaaaatcacaaccccacacagggtgagacaaacgtctcagtaaactcagggttctgggaaatcctccctaaccctggtttatcaccaagtataaatgaacatataaccaaagctaaggaaaccatcctagcttacacaaacaaagcctaggacctaatcctagctttcacacatcccagctctctgggtcatcatcagatgctctcagcatcagaggtatcccacctcatcctgactctcatagcctgtctcacagacatctcacagaggtacctattatagtgtctctcactagacactttccataccagagaggcaccgcctctttaccacacaaacatagcctgaggagatccctcaactcaggactctgaaccatacaaacattgcctgaggagatccctcccctcaggactttacacaatttgcctgaggagctcctcaactcaggacttcacaaacactggcctgggaataaccgtccaggacttcacaacatatgcctgggcaagaacatccatatagggcaatcacctctaggactttcacacacactggcctgggaaagaacctcctttacagggcaatcacctccaggacnnnnnnnnnnnnnnnnnnnnnnnnnnnnnnnnnnnnnnnnnnnnnnnnnnnnnnnnnnnnnnnnnnnnnnnnnnnnnnnnnnnnnnnnnnnnnnnnnnnnnnnnnnnnnnnnnnnnnnnnnnnnnnnnnnnnnnnnnnnnnnnnnnnnnnnnnnnnnnnnnnnnnnnnnnnnnnnnnnnnnnnnnnnnnnnnnnnnnnnnnnnnnnnnnnnnnnnnnnnnnnnnnnnnnnnnnnnnnnnnnnnnnnnnnnnnnnnnnnnnnnnnnnnnnnnnnnnnnnnnnnnnnnnnnnnnnnnnnnnnnnnnnnnnnnnnnnnnnnnnnnnnnnnnnnnnnnnnnnnnnnnnnnnnnnnnnnnnnnnnnnnnnnnnnnnnnnnnnnnnnnnnnnnnnnnnnnnnnnnnnnnnnnnnnnnnnnnnnnnnnnnnnnnnnnnnnnnnnnnnnnnnnnnnnnnnnnnnnnnnnnnnnnnnnnnnnnnnnnnnnnnnnnnnnnnnnnnnnnnnnnnnnnnnnnnnnnnnnnnngctctcccatggctgctggaggccagaggaagaagaaaacccaatttttccttcaaaaatcgtgacccccctttaaatagagtcagcgccgaccttcccacgctgccagcgtgggttcccacgcttcaggcgtggcactcccacgccccaggcgtggctcccacgctgcaggcgtggactggcagagaaaaattcatttctgggccacttcccacgccccaggcgtggcctccacgccccaagcgtggacctcccacgcctcaggcgtgggttcccacgcctcaggcgtggaacctcaaaccaaaagttagcctatgtacccccggtagtacatagacttgttggcgcaattccttctgtcctgcttaattcccgctacgaatccccttgctgatcgcgcggggtctggcgctaactgcgccatgccttggggttatcacattcacccctccattttaggaattttgtccgcaaaattccaattcaacaagacacggtcctaaccaggacctgcttctcctcacagattgtgtaggatttatcagattctctcaatctgatcactgttgggcttttctatatgtgatatatccatcacattaacccaattgggatacatggcaacccccacgaaatccccagcgactgggagataacctcctcattcacaaagcccatcctacacctatgctcggagacatcattagacacttctaaccgcccttatccactgtaaggggttcggtgtctaagatcatacatccttttctatcgactctgagctctcatctcatctttgatcctccggatctgctcaagagtcctctgaaccatctcaagttcaagaaacggtttcttgcatccatctgcccgatcactggagttctgcactaccggcatcatcaagcctcatcaggtgccatattcctctaacatgtgaaccatcagttccaaggaactccatcataggcagatatctatcccagcctgtaccctgctccaaggtacgctcacacaacacatcctccaggatctagatggctcactccatctgattctctatctgaggatggtaggctacactaaacctcagctgggttccaaaccttccgaagaatacttcatatccagaggtaacttcggatcactgtcactaaccaagtgacatatcagacacttgctgtctccacagctatgtctcatatcatccctggccacatgaaatcctctcaggatacagacacatcaaagtggtccttggatgaatatctaaccaatccttataacctcagaaggacggtatctaccagctctctctctctcgatatgcaccctcataaggcttagctcatcctaagccaggtgccttccaagagacatcatgctgggctaacatatccctcacagccaccccctgcggctggccttgcagacttccgctgcgctactctgatcatcatcaacttggtccctctcaaccagagaccagatgatcccctgtgctcgacaggcatatatctctgagctgttcacttagctctcagtcaaagactgtccacacgcatggatcgctctcatgctatcctgctcgagatcataacacatgtctaagcctctgctaagacgtatctattatctcaagcacaccggccatccggcctggacctcctggtcctatcaaacacatgagcacacatcttgctccctacatatggcggagctgcctcaacgcctagcggagctacctctacgctaataacaaacaaatggcggagctacctcaacgcccagcggagctacctcaacgctgatcacaacagatggcggagctacctcaacgcctcgcggagctacctcaacgcgaatacacatggcagagatccctcaatgcctggcggagaaccctcaacgccctgacggagaaccctcaacgtcagtatgatatcagatatatggcagagctcctcaatgcctggcggagatcctcaacgccctgacggagctcttcaacgtcagtctgatatcatcctcataagtctcaacatatgacaggtggcagagctcctcaatgcctggcggagctcctcaacgccctgacggagctcctcaacgtcagtacctgtcatgatgtggcagagctcctcaatgccacgggcggagctcctcaacgccctgaacaaccagcagagctcctcaatgctggtatatatctattgaccaataggcggagctcctcaatgcctgaatacatggcagagctcctcaatgccagtattcatcaattggccaacagatatatcacaatcacacataaatatatcaaatgcaaatacatatcagatcaatacaaacaatgccatagccaaagcatacagcatgaaacatgacccacactccaatgtgtgatctggactaacatacgtgtcgtcccctcgggaactatcccttacacatggacgcacgtctatggcacctccgaggtatagaaggagctcctcaacttctatcctcttggtctatacaataaccaattctctgggagctcctcaaccagagaaaaccaactaggaggaaacccctctcctagggaggtccatctcatactaactcaacatccactgctcctcgaagcgtggtactctccatcacatctggagaactaacatatacatctacccatgtatatgtatcaggtatataaccataccttacctctggtcagaattcatcggacatcaaatctagtacctctggagattctatctctgtgattgtcctcctcaggacacattccacatagtgactctactggccacaaaagaacacatcagctgacctgtaagacccattccccagtgagacttcccacaagcatcccactgggtatctcaggcctctacagcactcagttgcggtcgagtaccatcaggcgcttctgagctgtagtcaaaacaccctcagctcctagcctgtacccttatccactgggtcagcatctctgggtctctctactcactgtcccaccgagtaagtaggctgcttacctcggtgcctgctaaacataactcaacttggcgatactatctcaccaagctgtccatatcctgagatccactgttggccaccaacaccactaggtctcctctaagtcccctctggaacttagccacgaggacatcgacacctagcctggatctcctatcacaagtatacttggccagttcatcaagcctagccaaattctcaaccatagttatgtccctccctggactagactgtcaacctctgcctgtttctgctctctagcatccctgagatatcatacatatccagaaaataggcctctgacctctctgccaggtaagaatctctccctggcccatctgcagtgccactgtggtcttccaccactcctggcatcactctgcagcacataggtcgcctacagcaacctctgatggtccaaactttcatcatcccaaagatcttatcacagcctacagccaccttgctgaggcacaagatcataactactgtggaaggctggagggtcatgctcataaaacaataagcatctgccctcggctgcaacatctatctctgtgtaaccacatgggacatctggtcccctgacaggtggctcccaccaacctgatggcgacttccttcgccctcatcacccagcaggtgtaggggaatactcggtcacccctcatttttactcagacctcctctgacaactcctgatgagcctgcatcaaggcctcatgtatctctgtgccaacagctctctgccactgtacatcctcctgaacctgcctatatgcagctaactcttgctgtatggccgcccaatcagccactactggatcagactagccactggttgccctactgttgttcctggatctcgacatgacattgcacatgtacacaaatagtgagttgatcaggcccacctccagtgtacccacatgcaatactcatgtcagatcaaacaacaatagcaagcaacaccatattccatacataatgtctatatcaagaaaccgctctgataccattaaatgtaacaccccggacgtctccggcatattatcatcaatgatattcataacacgctatcagcgttaactaatcgcggtgcggaagcgatagaatcgtttttcttgattacattatgcatggaatacaaaaaaaaaaaaccacaccacaaagaacataaaacaagcccctgctgatccagataaaacataaacaactatataggcagatgacataaaacataactcagataatcaggaggaaacatattctataccatccacatcatatgtacatatacatgctcaaaaacaaacccacagctgggtcatacattagaatatgtacagaaaaatgggtatacacataccctacaactacacagagatcctaagaccaacttcccccttgaagctctactctggtcttcgactgcagcctcccatccagcctctcaggtccactagggcctcctgccctgaggtcgctcctctcctcaagaagcacctgaaaatcacaaccccacacagggtgagacaaacgtctcagtaaactcagggttctgggaaatcctccctaaccctggtttatcaccaagtataaatgaacatataaccaaagctaaggaaatcatcctagcttacacaaacaaagcctaggacctaatcctagctttcacacatcccagctctctgggtcatcatcagatgctctcagcatcagaggtatcccacctcatcctgactctcatagcctgtctcacagacatctcacagaggtacctattatagtgtctctcactagacactttccataccagagaggcaccgcctctttaccacacaaacatagcctgaggagatccctcaactcaggactctgaaccatacaaacattgcctgaggagatccctcccctcaggactttacacaatttgcctgaggagctcctcaactcaggacttcacaaacactggcctgggaataaccgtccaggacttcacaacatatgcctgggcaagaacatccatatagggcaatcacctctaggactttcacacacactggcctgggaaagaacctcctttacagggcaatcacctccaggactnnnnnnnnnnnnnnnnnnnnnnnnnnnnnnnnnnnnnnnnnnnnnnnnnnnnnnnnnnnnnnnnnnnnnnnnnnnnnnnnnnnnnnnnnnnnnnnnnnnnnnnnnnnnnnnnnnnnnnnnnnnnnnnnnnnnnnnnnnnnnnnnnnnnnnnnnnnnnnnnnnnnnnnnnnnnnnnnnnnnnnnnnnnnnnnnnnnnnnnnnnnnnnnnnnnnnnnnnnnnnnnnnnnnnnnnnnnnnnnnnnnnnnnnnnnnnnnnnnnnnnnnnnnnnnnnnnnnnnnnnnnnnnnnnnnnnnnnnnnnnnnnnnnnnnnnnnnnnnnnnnnnnnnnnnnnnnnnnnnnnnnnnnnnnnnnnnnnnnnnnnnnnnnnnnnnnnnnnnnnnnnnnnnnnnnnnnnnnnnnnnnnnnnnnnnnnnnnnnnnnnnnnnnnnnnnnnnnnnnnnnnnnnnnnnnnnnnnnnnnnnnnnnnnnnnnnnnnnnnnnnnnnnnnnnnnnnnnnnnnnnnnnnnnnnnnnnnnnnnnnnnnnnnnnnnnnnnnnnnnnnnnnnnnnnnnnnnnnnnnnnnnnnnnnnnnnnnnnnnnnnnnnnnnnnnnnnnnnnnnnnnnnnnnnnnnnnnnnnnnnnnnnnnnnnnnnnnnnnnnnnnnnnnnnnnnnnnnnnnnnnnnnnnnnnnnnnnnnnnnnnnnnnnnnnnnnnnnnnnnnnnnnnnnnnnnnnnnnnnnnnnnnnnnnnnnnnnnnnnnnnnnnnnnnnnnnnnnnnnnnnnnnnnnnnnnnnnnnnnnnnnnnnnnnnnnnnnnnnnnnnnnnnnnnnnnnnnnnnnnnnnnnnnnnnnnnnnnnnnnnnnnnnnnnnnnnnnnnnnnnnnnnnnnnnnnnnnaaggtcatgggagcttgggaagctctcccatggctgctggaggccagaggaagaagaaaacccaatttttccttcaaaaatcgtgacccccctttaaatagagtcagcgccgaccttcccacgctgccagcgtgggttcccacgcttcaggcgtggcactcccacgccccaggcgtggctcccacgctgcaggcgtggactggcagagaaaaattcatttctgggccacttcccacgccccaggcgtggcctccacgccccaagcgtggacctcccacgcctcaggcgtgggttcccacgcctcaggcgtggaacctcaaaccaaaagttagcctatgtacccccggtagtacatagacttgttggcgcaattccttctgtcctgcttaattcccgctacgaatccccttgctgatcgcgcggggtctggcgctaactgcgccatgccttagggttatcacaatacttctcttgacttagccacaatagcttcttctttttatcccggataatcttcattcctagaatctgctttgcagggtcgaggtccttcatagcgaaggatgagctcaatgccttcttcaaggcagcaatcttctctttgctttgccctacaatcagcatgtcgtcaacatataacagaaggatcaaaaagtctccgttcttatacctcttcacaaatacgcagtggtcagcttcagtcttcatgaacttgtgatcagtcatgaaggtttcaaatttcttgtaccactgccgaggtgcttgtttcaagccatagagactcttcttcaaccagcataccatgccatcgcatcctggagctcggaacccttcaggttgctccatatatatctcctcctccagctcaccgtgaaggaatgcggttcacatccatctgttctaccttgaggtccattttagctgccatggctaatacagtccggaccgaggtcatcttcacaacaggagagaagatttcttcaaaatcaacacctttcttctgattgcagcctttcactacaatccgggctttgtatctcagcttctgcccgttctcctcctgtttgatcttatacacccacttgttcttcagagctcgtctccctttaggcagctcggtcagctcataagtctggttttcatgcatagaattcatctcttcctgcattgccttcttccacgcttctttttccgagctcgttatggcctcatcataactctgaggctcaccgtcttcagcaatgatggtgtagtcatcaggtggaaaccttgtagaaggtcttctttctcgagtggggtatctcgactgttcttcctcagccgcttgagaacccgattcatcatcttcatcccggttctcgtcattaacccagacatcagtatcctggtcatcatcagcttcttgctagacatcatctttagtttctccccctgcttcagttcgcacaagagggacgggttcttcacctcggacaaaagggccggtttcttcacgtctgacagtaacctagacttggggctttgagatgtcatgaagtgtctcatcttcatgaaaaatcacatcccgacttcttactatcttcttcttgataggatcccacagtctgaacccaaacttggtttttggtgaaccgagatagatgcattacattgtctttgcatcgagctttgccctttcatctttgggaatatgtacgaaagctcagcatccaaacaccctcaggtgatcataagttgctcttcgaatggtccagacttcctctggaacttctccttcaagcggtcgagatggtgagatgttgatcaaatgaacagcagttctgacggcctctccccagaacgttttcggcaacccggcattggacagcatactttggaccttctcttcaatagtccggttcatcctctcggccagtccattcaattgtggagtcttggggggcgtcttctcaagtcggatcccggcttctctacagtaagcatcaaagggaccgccatactcaccaccattatcagatcgaacaactttcagcttcatgccagtctccctttccactatagcatggaattctttgaaagattggagtacctggtcttttgtcttcaaaagataaacccacactttttgggagtgatcatcaacgaaagaaacaaagtactgagctccaccaagtgatctctcgatcatggagcaaacgtccgtgtggacgaggtcaagaatattcttgcgtcgtctgggttgatccggtttcacaaaagaaacccaatgttgttttgcagctaggcaatgcgtgcaactctccagcacttgacccttcaacccggtcagtagttgtttgttctccataatctggagtcctttctcgctcatgtggccgaggcgcttgtgccacagctccaaggtcggtccatcccggacagaattggcctctctgccattggtctttccttgcatgacatacaaggagccttctttctttcctcgggccacggccaaatttcctttggccaacttccagatacttcctccaaagtagttcattaacccgacatcatctagcttgcctactgagatcaaattcaatcgcatgtcaggcacatgccttacatctttcaactcaagtcggcaccagacatatgtggtcagggttacatcaccgacaccaacaatcttgctggtcacttgatttcccatcttcacgacaccaaaatctccctctctgcaggcagaaaagaatcccttatgtggggtgacgtggaaggaagcaccggagtcaactatccaagtgcagtcatcatgggctatattcaaaatttctccaacaaggaaaaatatctcggcaatcgggttagcagccacagccgtggtactctgatcacttctttttctgggaacaacttgatccggcttcacacatccattctgttcatcattctgcagagtcctacagtccggcttcttgtgtcctaccttcccacagtagaagcacttcaagtcatgtttggacttagaccgacctctggacttgtctcgtccaccccggctcttgccacgatcccgggagtcgatctttcctctgttctcagcaacgttaacctcaaacgtgctggatacacctcgttctcttctcctagcttcttcattcagaaggttgtctgtcacgacatccatcgtcagttttcattctggaaccgagttgctcaaagtcaccaccaaagtatcccaactttccggtagcgaactcaacaatagcaaagcctgcatctcgtcatcaatcttcatgttggctttggacagttgattcacaattcctttgtaggcatttaggtgctcgatcatactcatgacgtccttgtattctagcttcacaagccggcagaccaggtgtgctttgttcctgggtgtcttcttctgaatcatggactccaatttgttccacaactcgtacgcgttcgtgaactcggacacgtgctcaagaggcttttgtcaatgtatttcttgatcgtggccacggccttccgactcaggatctcccaatccttgtccgacttcccggtcggcttcacttcaaggataatgggatcatataaacccttgcagataagatgatcctccatcatcaacctccagtagttgaagttatctgcggtcaatttgaacatatctccatctcatctccttcagaaccctcgaacccgggctttgataccactgttgggtatcgcaaaccctcaaatatcaaattgcggaagcggaaataaaatcaaaagggagcgagagagacaatcaaaatttgttttacgtgagaaaaccttcctcaatgtgagaaaagaaaaaattcacgggacctagtccagtatcaaaatccactataacaaatcacggttacaatgaatcaaaaatacaccaatggtggtggtatactcaacctctccaacaatagtggtcattcaaacgctcacagtgttttactctaagctctcaaatatgcaagcacaggggcttgctcaacaatggcactcaaaactgtcacttaaggctctcaatttgctatgtatcttgcctccactcttactcatctatttatataatgaattaggtttataatgaactgggcctaagctgtcaaatattatttgatttagtcaatcaaataaaaacagaaaatatcaatcaaattaaaacgaaaagtattaatcaactaaaaacagaaattatccaacacacatgtagtcagaaaaattgatatggctcgattttatttctgaaggaaaagaaaatgaaacgtagcgacgatgtctccgactccacatgagcgggtgaccacaaagcaagacatgacgaaaactcacaaatatctcgaccagaaaactcttgtacaaaactaattttaaaaatgagaaacaaataaaaaatttcaaatagtaaaagaagaaacaaattatctaacataaattggtttttgaaatatggaaatggaacaaaagcagcaacacatcccgaaaccaacgccaaatcaaagaaaggaaaaagacgtcacagatggcttcagcgaaagctatatatgtgcctttttaaaattttatgtttaaataattattatgttaatactatgagataattatattagttatttattattagcatattttattttatgtgatcaaattaaattagttcgtttgattattaaataaaattatatgaatttaaatgaatatatgtcgggtgttagttttaatctctcaatttaaagagttatgaaggttcgttgaagaaaaaagaagcttcattatacctgtttgagtatagtgttcctaatggattatcgtaaaaaatacttagatcagggaccatttaatgattcaagtatttttattttatactataaaaactcggtaagcttaccaagtagaccgctcattgctcaatattcagagaaccttgcataattaaataaggaaaaatagaaactttatctttatttatataatagaaagataaagattactcctaaatctagaataatttattatacaaggaaagattagataagattatacttttccttaattatatcatttaaccagggagattctgatcatatatagatctaatttcaactctataaaagggattatcaaggttataaaccaattatactctagtctatagttgatacttcttcaaacctctatgacactaacttgaacggagagtgtctttgcaagtatatctcatcactcctttaagatgagctcttaaaggaacattaccatgaggaggttctatccatcaaacatgttatagatcctcggacttttgataaattgtcttaggttgtatatatgttaaaggcttccgcataaagaatactaaaataaggattaatgattacaattttaataaatggtatcagagcagcaatgttatcgttgtttgattattaggatttaaaatttttaattattagaaaaatcaagatggatttttcttgaatggatccttctgcaaaatgctacgaatacggttttagtttcaaaggttttcttttgacaactactaacaaagttatgaagattaaggttttatgaattattcataaattgtgaatgttatgcatattaatttgcatgaagggaattaaaaataaaatccatagaatcagaggtattatttttttccatgcacaattgatttttgattaccttacaatgtgatgagttttttcttaaattgattgtcgtgagaaattaggggcgttttgtttcaaaaaaatgtggatggacttcaaaaaatagagttgcaaatattgttgatttttttttttttatcagccaaacattgatatatgtattgaaataagggtacaagaggtaccaaaagttacaagcaaagagataagaaatacatagcttcactcccagcctactctctaccccgcagaatataaaaaccatgttatttgattgtctaaattcaaagcctccctcgtggaaccaaccagaatcccccctgaaaagtgatctgaacataggttattggaatgctataaaatgactatagcattgacaaatcttagctaccagatccatggtaacaacaaaaagaaaagaaaaacgtaaagtttatcataaccagaattttcaaaaagacaacccccagcaacatctataccagtttgaaatgctaaataaattctcttaagacacaataatctcggttgctgtatccagtcaaataaagagaattccatgccttcgattttcctgacaaccacgaccatgatttgaattggagtaagtcccaaactttctcctcaagttgatgttgttggaagaccatataatttatgtgagtccataaataccatatcacagcaaaccctatggatttcttataacaaacacatacgaatatttgttttcatttccatacagatatatggaatggattctagacattttttaagtctttcaaagttaaagttaaactttaactaggaaacaaaattaaggctatcaaatttgaccatggtggtgaatactatggtatgacggataagattagcaaccctttgtgctttttctaatttaataaatgtgaaattgttttataatatataatgttggacaaatctagcatgaaagaaattgtagaattttgaaactgaactccttaaagatatggtaagaaatatgattagtcattcttctccaccaaagtcactttgggaagaggcattaaagactgtagtttatatcatctacaagataccaagtaagtaattgctaattaatgattctttatagttgtggtatgagaaaaatctcacattaggcacatgcatatttgaggatgtccaagtgaagaaggacatatagcacgcatgaaggtaagctagacttaaagattaattattactttgttgattacattgaaggctcttgtggatataagttttaccattccactactagatccttctttgaaacaaggagtataaaattccttgaagaagtttagtttggaggggaaggaaacataaaaacttgttgcctttgaagaataatatgttattgacaattaacaagtctttgtacttatcattgttcaagaaataaatttgataattaataatgatttcatttttaacattatttcatgggaaaacaatacttagatttctccctagttaaacattacctatagttcaaactcaatcatctcaagaaatggcattaaaaagtttcactagaaaaaaaaagaagtgcaatttaattatgttatatttcttcaagaacataagtacgttgaaatttccatttaaatttctaattgattcccaagtaaattcattcctctatattgcctatatattcattttttatacctccatactaccaacaattagataatgatttttcattttctcccatttattcttatgcattattcttttcttttctcttatctttttcataatcttattttgcatcttattctgcattttttaatttcttttttagggtacctctgtttnnnnnnnnnnnnnnnnnnnnnnnnnnnnnnnnnnnnnnnnnnnnnnnnnnnnnnnnnnnnnnnnnnnnnnnnnnnnnnnnnnnnnnnnnnnnnnnnnnnnnnnnnnnnnnnnnnnnnnnnnnnnnnnnnnnnnnnnnnnnnnnnnnnnnnnnnnnnnnnnnnnnnnnnnnnnnnnnnnnnnnnnnnnnnnnnnnnnnnnnnnnnnnnnnnnnnnnnnnnnnnnnnnnnnnnnnnnnnnnnnnnnnnnnnnnnnnnnnnnnnnnnnnnnnnnnnnnnnnnnnnnnnnnnnnnnnnnnnnnnnnnnnnnnnnnnnnnnnnnnnnnnnnnnnnnnnnnnnnnnnnnnnnnnnnnnnnnnnnnnnnnnnnnnnnnnnnnnnnnnnnnnnnnnnnnnnnnnnnnnnnnnnnnnnnnnnnnnnnnnnnnnnnnnnnnnnnnnnnnnnnnnnnnnnnnnnnnnnnnnnnnnnnnnnnnnnnnnnnnnnnnnnnnnnnnnnnnnnnnnnnnnnnnnnnnnnnnnnnnnnnnnnnnnnnnnnnnnnnnnnnnnnnnnnnnnnnnnnnnnnnnnnnnnnnnnnnnnnnnnnnnnnnnnnnnnnnnnnnnnnnnnnnnnnnnnnnnnnnnnnnnnnnnnnnnnnnnnnnnnnnnnnnnnnnnnnnnnnnnnnnnnnnnnnnnnnnnnnnnnnnnnnnnnnnnnnnnnnnnnnnnnnnnnnnnnnnnnnnnnnnnnnnnnnnnnnnnnnnnnnnnnnnnnnnnnnnnnnnnnnnnnnnnnnnnnnnnnnnnnnnnnnnnnnnnnnnnnnnnnnnnnnnnnnnnnnnnnnnnnnnnnnnnnnnnnnnnnnnnnnnnnnnnnnnnnnnnnnnnnnnnnnnnnnnnnnnnnnnnnnnnnnnnnnnnnnnnnnnnnnnnnnnnnnnnnnnnnnnnnnnnnnnnnnnnnnnnnnnnnnnnnnnnnnnnnnnnnnnnnnnnnnnnnnnnnnnnnnnnnnnnnnnnnnnnnnnnnnnnnnnnnnnnnnnnnnnnnnnataatacctactttcaggatctttatgctctaaataaattagtaactaacacaaaataatttcatctctatttttatattcctataataatgtaatattttttatttacttttttcattagttcattatttataaatatttttttattttatgattttatatcttcatataatgtaatacttatttttattttatgtttatcattttaatgtaaacataaatattattttgattaaaaaattaaatcctaattatatctatttatactcaaaattcaaaatatcatactcaaattataaattttttaaaatttcaaaaagaataaattagaaataaaattattgtaaaaaaacaaaaaataagtaatattactaattttaattaaatttaacttttaatcaacaaaataaaaatttgactgaattttttttagcatttttaaatgtgattcgttctccttttttatttttcgttttccatagagaaattgacaaatttaaaaaatagatttgttcttatatgtatatcttaaattttttttaaaaatcacagatcttaatcaaaataataaatgcacttgaataatacaattatcaatatttttttatttaggcacaatcatttaattaaccaaatattagaagatatatttatttaatttcggtcaatttcatgtccgttcggtgtggggtttgcaattcggtttggttcagttttcatttaaaagtcacccgaaccaaatttaaaacacatatgtggttcggttttgtttgattttgatttaaaatcaaatccgaaccaaatcaaatcaatattttgcggtttggttcagttcgatttttgtgatttttattaaaatattatttcaataaaatttaaatagtttcttttcatattttaaataaaactacattaaaaaaattattgataacaatctatgaaaaatttattaatatgttaaaccttctacgataaaaatttgtaaaatttcatttatttcaaaccaaacatatcttaaaaagtcgtatggaaataaggtactatgtattatataagttttgtatacataacattactaaatattgtaaaacttaagtggtacacatataaaatgcataacactaagtaatataagtgttaataaaagtattgcggttttgttcggtcttaaaaacacaaaacacaaactacaaaccgaattgaaccaatcgatttgagaaaaaatcatccaaacaaataaaaaaattgggttggttcaattttttgttttttttagcggttttcgatttttattttggatatgtttgaatttgaacacccctatgattgggagaggtacttgtggggtatggggaagagactaaaaaaggtattttatttaattttaatataatttataagatttaaatttcatttaattaatctcactatatttaattttaaaaaaagaaatacattcaaagttgaagcaaaaattcaaaataaaatcaatttattatatttcaattgttttattatacatataccaagctatgaacttcaactcagatcaatgtttttgttcatttgttactttatttaagattcaatgtaaaatttactattatcatatcgtgttattattctaattaacaatatttttattgtgttatatattattcttttaaatcttaaaataaatgtagaaaattgttcataattagtagctactaattagtttgtttctcagaaaaaagacaattaatttggttaaatatgttttttaaagaaaagtttggataaatattttggtgtatattgttaagataaccacattacttgaaaacgtattcaacttcaaaaacaaatattcacataaccacataaatttttatcactatttctaataaattgatttactacttataataatttgataacttaaacatatttaattaattaacttaaattattagaaaaaagttttatcataccataaatgaacttaaatcaactttttttttattaagaaagtcaaatataaaaatgcaagacatcactaannnnnnnnnntaccttcaaaaatattaaattatattattcaattcaattattaattcaaataaatattgttctattatgaaaacagattctattttattattcattttagtagagtgcatgatccgtatgatgcacagcttaaataattttttataaatatttatataaaataatttgaatatataaatattgtattaaaatttacattaattattagttataattaaaatataatatctgcattaataattagtaatcattaaaatataatattttaaattataattaaatattttttataaaatatggttaaaatacaaactaattaaaagttacatgtataataaaaagacgaagaaactaaaatgaataaaaaaaataaactcgaaagttttgaagaagatttcataaatgacactattcaattctacggtgaacaaaattacatgagaagaagatgaatagaaaagctgttgttatggtagtaataattgggcccagtgataaggcccaattattactattgtgcgttccaatcttcatcgaacgtggaccgtaactaagtcaacagaggcagttgagatgtgggagtggaaaccgatattcccagaagcagttcgtgcaataactgcaaggtaggttgcttataaatacatggtgattataaccaaaaaggtacacacacattctgactctatctttttcaattacacagagcacacaccccacgtccattggtgtatccctctgtgatcgtctgcttcagggtatcattctccattgatatttctgaagtagaagagttagaatctgatccaagagcaaacatccaacccattagtgctgtacatttgtgttctggaaacatacagaatattggcgccgtctgtggggaacgataaaattcgagtcccacgatttagcaatggtaaatacaagaaacagtcagtcaataccacgttcagagatgcctaatagagagatattcatacgggaaaatcgaaacgtggcgcagcgtgaggaagtgcatgttactgaagtcgtatctgatgcggcctcttcacctgttccgaccgagcaacggagggagactccagcgcggaggatgatacaggaggaagagctgggagagcgattcgttagtaatgctctcaattcgatcttaagccgaattgaaagcatggaaaggagacaaacccttcagaggcaggaagatatccgggcgataactcgtcagatggaggagcgtaatgaagaatggaaacgtgctgaaggacaacaaatggcacagttggaacgaaagctacaggttatggtggaacgggtagacgttttgaaccatgaagaggagtcgttaccagcagggcaagatccgaggacatccgtgagccaaccaaggaatgccgagcagtctggtgatcggatgagaagcgaaaatccaaaccacgagcagatccgagttcctgagccgttccgagacgaggtcaggaatgaggagaatattcgtagccgggttgagaacccggaggctcaactaatcaacctaagattaacggatcacggcctagaaggggaatcattttctcgtggaaaggaaggaccggtttatcggagaaagtatagccggggccaacaaaataacagcccttttgtggacgaaatagtaaatgcccgatatctggacgattttgatgggtcattcctgtcaaagtatgatggaacccaggacccacaggtgcacattgatgagtttgatttgcaaatgtgtgttcgtggcatagatgaaccaattatctcaaggatttttgttactacattgacgggaccggcacagacttggtttcatacactgccgccgagatcgattaggaatttcgaggattttgggcagaaattcttgttgaattttgcgaccagtaagaagcagccaaaatccgagttcgccttgggaaagataaagcagttacccggagagacgttgcaaagttatctggaccgattcaaagaagcagtgttgcaagtacaacggttggaggagaaggtccacgtgtatttaatctctgctgggttgaatggttcttctagattcgccaagtcaatctacaaagacccagtaaagtcgttgatggaatttcgaacccggtcgaagaaatatttggagttggagcagatggagatagcaaacaacccaagacgagaaaaagagcgaagtcctaggagaaggagcccacccccgaaaggtaagggacactccgagaatcaaaaccggaataatgacgtgaagttcaggtcaggaagatacgagaacaagtatgagaagtatactccgttgaacgtctcccgctctcagatttggaaagaggtggcactaacggacatgaaaaaggtagaacgacctcgccccatgtttaataaagccggggtagacaagtcacgattttgcgagttccacaatggacccgggcacaccacggaccaatgttgggacttaagagatgcaattgagaagttcatccgagaaggaagattaaggcaatatgtgattaaaactcaaggacgaaggaataaacgcaaaggagatgaggtccagcatgaaaagaaggatgaaagaaagaagttacgggaaggggatgatacattcctgaaacccgaattcgaatgtaatgtgatctcgggagacatggggggtggaggagacaccgctaatcagaggaagaaatatctgaaggaggtattatcaatcagagcacagccgaagttcaaagacagagaaggagataaagaacctccattattgtatttcacgaagcaggatatggagggagtagtgccggggcatgaaggcggactcgttatcaccggaacagtgggtaattgccgagttcggaaaatgttcgtaaataacagaagttccgccgacataattctatggagcgcgttcaaaaggatggacttggacgtcgaagacttgaaaccgtgtaaaacaatgttaattggtttcaatggtgggaatacaaatgttaaaggagccatttatttgcgattgacactaggcacgagggaggctttcaagtcggaaagagtaaggttcgtagtggcagattttccttctcaatataatatgatattgggaaggcctactatccacaaatgggatattttgatgtctatgaaacatcagaagcttaaatttatgggcggtaatggtcaggtggtgaccatatgtggtgatcagaaagattctcggcagtgttattataacacggtccgagaaagtgaaaacaaaccattgccattattccgagatcctgagagaactcgggataccaaggaggatagtaatagccgaatacgaccagtgaatacggttgagttggatatgagagaagcatcagatgagtggaggccagagcccgtagaagaggtggagcatatccagataggtgatcaagctgatcaaatcaccaacatcggacgaacgatggaagctggccaaagggagacgcttattcaatgccttcagaaaaatcaagatgtgttcgcatggaaggcgtccgagatagtagggatagaccctgaattttgctgccatagattgtccatgtacccaggatcgaagccagtacaacagaagaagcggaagctgggaccagaaagaactcaggcattgcgggctcatatcgaagaattgctacaagccgggttcatacgggaaattcagtataccacctggctatcaaacgtcgtgatggttcgtaaaccgaatgggaagtggagagtatgcacggattatacagacttgaataagatgtgcccgaaggacgcgtaccccatgccgaacatagatcagctagtggataactcttccgggtttaaggtactgtcattcatggacgcattttccgggtataatcaaatcacaatgcactcggaagatcgggagaaaacggcatttattggcgacaaggctaattattgctataacgtgatgccgtttggttgaagaatgctggggccacatatcagagaatgatgaacagagtgtttgaaccacaactcggccgcaacattgaagtatatattgacgacatgatagtcaagacagcagaagttaaccggcatgtcgatgatctagaggaaacgttcggccggttgcggaaatacaatattcgcttaaaccctctaaaatgtacctttggcgtcggagccggaaaattcttgggacttatgttgacgcacagaggaatagaggcgaatccggataaatgccgaaccgtgttagatatgcaatttccaagaagcaagaaggagatacaacaattaacagggaggatagctgcactgacacgtttcatgccgaagtcggcagaaaaagcccttccctttttcaagatgttaaagaagcaagttgtaatacagtggaccacagagtgtgacgcagcgttcgccgagatgaaaaaatcgttggcatctccacctgtcttgtcgaagccggaactaggagaagtgttgattctgtatttaccagtaggggaagaggctgttagcgccgtgttggtaagggaggttggtgcagcccagaaacctgtgtatttcgtaagccgtgcttttgcgtgactcagagctacgatatcagaagttagaaaaattggcgtttgcattgatcacggtcgccaagaaattacggccatattttcagagccatactatcattataaggacgaatcaaccaatccggcaaatacttcataagccagatttagcgggaagaatgaataactgggcgattcagttatctgaattcgatttaaagtttgaagcctgccatgccataaaatcccaggcattggcagacttcgttagggaactcactcctcacaattcatgagccgacaattggtggaagttatatgtagatggttcatctaataagagaggcagtggagctagggttataattgagaacccggagggggtagctacggagttctctttacagctcaattttccaacgtcgaataaccaggccgagtatgaagcattaatcaccaggttaatgcaggcgaaggaacaggaagccgtaaaggtgaaggtgttcacagactcacagctggtggcggcccaaatagagggtcgctatcaagtgaaggggccattattggcgaagtatttaggtcgagtaaaggaagtcgtagccgaattcgacaaggtggaagttaatcatattcctagggaagataataccagagctgacatcctgtcaaagctcgctagtaccaagagtcttggaaataaccggaccgtggtccagcaacaaattctacagtcgtcctgcataatgatgatcacaacggaacaagattggaggcgtccaataattgattatttggaaaagggcacgctaccggatgatggattggaagccaggaaattaatacagaccgcgaccatgtatacaattgtcaacaacgagttgtatcgaaaaggacttcacagccctatgttagtctgtgttaagccggaccgggttggatatgttttgtccgagatacacgaaggaatcaacggccaacacatgggggcgagagcattggcaaggaaagcactctgtgccggatactactggccgaatatgggagcagacgcggcaggacatgtgaaaaggtgtgagagttgtcagaagcatgcttctaagatattatctccgccagaagagctgcaatccatctcggcaccttggccattcttcaagtggggaatggatttgttaggtccatttaagccggccgaagggcagctgaagtggttgatagtcgcagtggactactttaccaaatggatcgaagtcgcaccgttggcctcgatcacgtttacacgggtgcagcgattttttgaaagaaacatcgtaaccaggtttggaatcccaggggaggtcattacagataatggcacacagttcacagacaaagggttccaggagatgatggccgggctccatatccggcacaagtttgcttcagtagaacatcctcaatctaatgggcaggcagaggccgcaaacaagacaatactggaagcattacgaaaaaggatgcatgacgccggatctgattgggtggagcagttacattatgcaatctggggaattcggaccaccgtccaaacttcgactagcgaaacacctttccgcatgacttacgggtgtgaggccatgataccagtggaaatcggataacagtcgtggcgacgggaacaggtgctgcaaagaggtgaagagtccaataatgaagcgttggcgatagaattagcactggtagatgaagtccggattgctgcccatgcccgggaccttagagccaaatgacaagcagcactctcttataacaagaaagtggtcccgctcaatttgagttaaccgagttggcattacggagggcggacatcggaaataagagcgtccaggacggaaaactgacggccaattgggaaggaccataccggataacacccaaactcggcaagggggcctacatgctggaaactttagaaggcaaggcaattaaacgaacatggaatgcggataagctcaagaaatattatagttgatgattcgaaaatgttcgttattattctgcaaaatggtgtgggtgtctcttttattgagagtatgaactcagtggtcatttgccagggttcatatggttctccttcattgagaccacaccattctttgaaaactggtggatttctcgattattgagagtatgaatttggtggtcatttcccagatacatatggttctccgtcatcgagatcaccagtacaaataatgtaacgcggtcgtagggtttaggtggtttatttcttttttgagaatatgcgccgagaacgattgttcgctatctcggaacatatggttctcatttagagaaggccataaacttattgtaatacgacggtgttaatttgaataaagtatgcagttcagtatcattacatatgttttatggagagtatagatctaggtagacaaagatttatatggttctcttaaaaacttgacaacgtaacaaattgtttgagcggattttagaacattgaataatgtgttggctggttctgatcaaatcggtataagagtttaacccatcagcaagtttttcattgtgaaaatccaagtctcgaaaataaacaaggatataaattttgattgttggtgcgcgtgtaaaaaaccaattacccgggtaggacgaactcggatatcgtatgataaaataaaatatatatatatatatatatacgttctgggcttaaggctcaacataaacataatgaaatgaacaaagtgttccgggctcagccctatgaaatctaaaaactacaagttaaaccagcatcccggcccttcattccttctcggaaggtggctggttgtcggcaggagcagcggcagtcggaatggtggaggttacttcatccccgggagagggatcctcgattgccggcatagaagaatcctcagccccagcaggaggaattaaatggccatcatcaacatatgccataaaatgcatcccggtagtggcgagggccacgcccgggtttaagcacttgatctgctcaagggcattgttgaaggcctcctcggcagtagcagcaagggtagttcccattgaggctatctgcgcttcgtaagcctagaccttctcgtcgtgaacgaccttcgaggtggcgagagaagaggtcaggagagcaacctgctgttcggcagcttcaagagagccttgagcccggccaagatcactttgcaaagaggcaaaggcaacctgggacgagagcaactcttcttttagcttccgggcctccgagagtaagttctcccggagttgccggttctccacaaccagcctctcctgagccttctcatgcccggctttggtggagagaagctcttcataaatctttttcttctcctcaaccgaggccgcatacctgcatcataagttgttcaaaaaatttgccccatacttgagaacatatacacaaaagagtcatctcaaagacacgtaccttttgcgcagagtagcaaaacctataatcagcgatgcacacttgaaggcgttctcctcaatgcgcacgagttcggcaagctcctcacccacaggggcacgggcttcgaggagacgggaagggggtttagtcaacttgacgatctccctagttaccccatcctcccaaaggttctcgggatgagagcgagtgtcggagcgtccggggatgatcgaggaaggggtcggtgatgagtcactatttatcactatttactcatctttctgtactcattttaatccctagcttgtgcttaatcgtttatatattttgcattgttctcatttaggatttaattagaccgataattcagattttaattaatttggattattttaagttaattattccaatttttattttcagggcagattaataattaaatgggcttggaattaatttttggacttgaagattggagtgccacgtcagcatcattttccacatcagcagcttattttcgttttattttattttagtgatttttgggctaaaattgttaggaaaaggcccattcttttgtgagaggcagatactatatatttgggaaactgtgcccatgcagggaggacatatacaacactattcacgctcagttttagggtttgagagtattttcgttttctgcttctctgtttttagttttttcgttttctgctggtgactatgttttagagtttcattttgtttgaattctcaattccagtgactatttcgtttctgttccaggtttctgtttcttctaatttcgttttctgcttttaatttcattctctgtttaatttgtttcagttgcgtttctgttgttccgttttcagtatttaggttttcgttatgttacgttttgtttcaattcgcgtttctgttgttatttttgaattaatggaaggctaattcttagggttggaccttaggacagattgcagaccatcaatggaggttctctgtattgcaattcgtattctgctttgttcttccttgttgggcttctgttctgtattgttttcgaattggagtcatgcttaatgattctgatattgattgatgcagtaatctcaggtttcttaatcctgagagcttgccctgacgaggttcacgtttgcttaattcgtgtaatgaagttttaagttaatcttcgcttagtagattaatctggactgataaggattaagtaggacagattatctttcgtgaaccgaggatattagaggcgcaatttgttcgaagggtctgacttgttttaatcactgaaattaattttggtatttctgttttatttttagtattcttgcattctgtcaaaaacctccccattgcacttttaaccccttaacatagacaattggtccttgagagacaacctaggagtcactacctagttactgcatttaatttgtattaatttgaccgagtgcgacctcgcgatcaaattttggcgccgttgccggggaccatcagttctgtttaagggttttgtgtgtgtgtgtgtctgttctgtgtgtgtttgtgtgtttctattttgtttgtgttagtgttgtttttgctttgtgttctgtgatcattgttcattgttgcaagtggtagagaagcaaagtagcattcgagttaagctgagaattttactctgataaccaatggaacagtaacttgaattagcctgttgcctatatcagttcctattttctggtgtagctcgttataactgtgcttcaagtttttgtttcttgcatatttggttgtgttgatcaattgtgcaggaccaattagtgccttcagcaagcaattcgcataccagggagcaacagcagcaatggaacagtatgaacagtaaccagtttttctgaattaattgtgatttttggttttgatagctagacttgttattttttctttaaattttgtgtggtaacttcttttagcttatatttgtgtggaaaaataccaaaagcacataaagtagttcaaattctgagatacaaaaatttgggaagccaatttttgcgataacttcaaattgtcataactttcgatccgaccgtcagaattggacatattttatatgcttttggggtagaaaaaaaagatctagccatcccagcagctgtgtctgctggccaccattggattttcaaaaaaaagccgtttcctattttatttttatttttgaagttttattttcctatttttctaaactttcttaatctggtttatgtagttatcctttgaattttgctttgaaatttggtgtgatgtcttttcatgattttagggtgctgctcacaaaatttcagctcatttggacttagtttgagtatagctctagttttacctctctttatgcttgtctgccaaatgcttgatatgttgcatatagtgcatgactagaggcaatccagaagacttacaatcctttgatcccgagatagacaggacctaccacagattagttaggcattctaggcatttttcattagattctgtaccattagatagtgttagtttgaattctgagtattctccttctacattcaccaactttaattctgtgcataccatttctgattctgctgatcatattaacactgagaccaatatggctcaacctccacctcgtagaggactcttagggagctggctgcacctgattttacctatgaaagcatgtgcattcagtaccctgatgaggatgttccatatgttctcaagactggactgatacatttgctgcctaagtttcatggtcatgcaggagagtgtccacataagcatctgaaggaattccatatagtctgttccacaatgaaacctccagatgtccctgaagatcacattttcttaaaggcatttccacattcattggagggagtggcaaaggactggttgtattaccttgctcccaggtccatcactggttgggatgatcttaagagaatgtttctggagaaattttttcctgcatctaggaccacagccatcagaaaagatatttctgggatcaggcagcttggtggagagagcttatatgagtactgggagagattcaaaaagttgtgtgcaagctgtccacaccatcagatttctgagcagctccttctccagtatttttatgaaggtattaacagcatggagaggagtatggttgatgctgctagtggtggagcacttggtgatatgacccctgcagaagctaggcacttgatagaaaagatggcttctaactcccagcagttcagtgcaaggaatgatgccattgttattcggggagttcatgatgtagctgctaattcttcttcatctgcagctacgaaattagaaggcaaattagatgctttggtgaatttagtgactcaacttgctgtcaaccaaaaatctgcctctgttgctagagtttgtggtgtctgcacttccaatgatcattatactgatgcatgtccctctctgcagcaacctgttagccctgatgctcctcaagcttattctgcaatcatctataacaataggcctcaacaacagcagcagattatgatctgtccagtaacagatataatccagggtggagaaatcatccaaatctcagatggtcaaacaaccagcaacagcctccaccaccaccatttcaaggttctgctggcccaaccagaccttatgtgcctccaccagtccaacagcagcagtaccagaggcaacaacctgatatacgtgtaccaccagcccctcaaccttctacttctgaaccttcactggaggagctagtgagacagatgacccttcaaaatttgcaattccagcaagagaccagagcttccatccagagtctgactaatcagatggggcagatggctactcaactcaatcaggcacagtcacaaaattcagatagactaccttctcagactgtgcagaatccaaaaaatgtgagtgccatcacattgaggtcagggaaacagattgacatacctactgcggtaccctcacctccatctataccagttcctacaccagcccctgcatctgtaccaataattgagcaaaatgaagatacaattggtactggaaaaattcatgcaggtggaccttcttctagcaccatttctgatgagcagcagcaatcttccatccctcttccatttcctcccagatcgattccaaacaaaaaatggaagaggtggataaggaaatattggagatcttcaagaaagtagaagtcaacatacctctgctggatgccatcaagcacatcccgaagtatgccaaattcttgaaggagctgtgcactaataagaggaagaggaagatgactggaattgagagagtcagcatgggcagaaatgtgtcttctatgacaggtaattctgttccaaacatgcctgaaaaatgtgaggacccaggtactttcagcataccctgtgttattggtagtaataaatttgataaagccatgcttgatttaggtgcctctataaatgctatgcctctgtccatttttaaatctatgtctcttggtcctttgcaacctactggtgtagtgatacagttggcaaataggagtgttgcctaccctaaaggtttcattgaggatgttttagttagggtcggtgaactgatttttcctgctgatttttatgtgcttgatatggaggagggattctcccatggttctgttccacttattttaggcaaaccatttttgaaaacagcctgaactaagattgatgtgtatgctggtacattgtctatggagtttggtgatattgttgtccattttaacattcttgatgccatgaaacatccatctgaaaatcattctgttttccgtgctgagattcttgatgatgttgttgatgagtatatttctgatttttattcttcccatcaaacgaaacaatgttttctatctgatctttacacttctcttgcatgcatagaatctgaatctgaatatgaatctgacaatgattttgattttcaatctgaacatgtgtcccattttgatgcacattctgaaattaattctgatgtattgggtgttgtacctctggatataaattctttagagtcagaatgcactaaccatgtttcaggaagtacacaagaatctgacttgcaggttgaggtacaagctgtggaacccattcttcttccatccctggttccttcctctgatcagcctactcccattccagaattaaaacccctaccgaaaaacctcaagtatgcctacttggagagtgatgagaagttgccagtgatcatttctacttccctttatgctgatcaagaggataggctgttgaatgttctgaaaaagcataagaaagccatcggatggaccctggcagatatacctggtattagcccatccacttgcatgcacagaatatcattggaggatggatctaaaccagtgagacagccacagaggagactcaacccggtaattctggatgtagtgaagaaggaggtgaccaaacttcttcaggccgggatcatttatcctatctctgacaatcagtgggtgagtccagtccaggtggtcccaaagaagacaggcctcactgttgtaaagaatgacagggatgagcttatcccgaccagagtgcaaaacagttggagagtctgcatcgactaccgaaggctgaatcaagcaacacgaaaagatcattttccgctgccattcattgaccagatgcttgagcgtctggcaggtaaatctcattactgtttccttgatggtttttctggttattttcaaatccatattgctcctgaggatcaggagaaaaccacattcacctgcccctttggcacttttgcctataggaggatgccttttggcctgtgtaacgcccctggtaccttccagcggtgcatgcttagcatattttctgattttcttgaaaattgcatagaggtgtttatggacgattttactgtatatggatcttcttttgacacatgtttagatagtttggataaagtgctaaatagttgaaactaaccttgttttgaattttgagaaatgtcatttcatggtagaacagggaatagttttagggcatgtcatttctagtaagggcatagaggtagatcctgcaaaagtatctgttatttcacatttgccttacccctcttgcgagcgagaggttcgttctttccttggccatgcagggttctacaggcgctttatcagagatttcagcaagaaggcccttccgctatccaatctgctgcaaaaagatgtagattttatttttgatgatagctgtaagaaggcgttcgatcaccttaaggaagcattgactactacccctatcctccaggcacctgactggacagtcccgtttgaattgatgtgtgatgcatccaattatgcattgggggctgtcctggcacagagagttgataagctgcctagagtcatatattatgcttccaggactttagatgctgcccaagcaaactacactaccaccgagaaagagcttcttgccattgtgtttgctcttgataaatttagatcatatttgcttggttctcctgttattgtttatactgaccatgcagctctaaagtaccttttgaaaaagactgactcaaagcctagactgatcagatggatgcttctgctccaagaatttgatttggatatccgtgaccggagtggagctcagaatttggtagcagaccatctcaccagaattgaaggagctgagaataatgatgaggtgttgcccatccaggataattttcctgatgaaaaccttttaagtgtttcttctgtttctgtttctaaccccaccccctagtttgctaatattgtgaattatctagttgcttctgtttttcctcccttagcatcacgaactcaaattgataaacttaagagtgatgctaagcattatatttgggatgacccctatttgtggaagttgtgcaatgaccaggtgattaggagatgcataccagatcatgagatcaattcggtcttgcagttctgccattcttccgcaccaggtggccatctcggtatacagaggacagctcgcaaggttcttgattgtagtttatactagcctaccatcttcagagatgcggcgaagacctgtagcacttgtgagcagtgtcagagagcaggaggatcccttacatggagacaacagatgcctcagcaacccatgctattctgtgaggtgtttgatgtctggggtattgatttcatgggcccctttcctgtttcttttggtttttcctacattcttttagctgttgattatgtttcaaaatgggttgaagccagagctactaggactaatgacgctcgggttgttgcagattttgttcgatctaacatattttgcaggtttggaatacccagagccatcnnnnnnnnnnnnnnnnnnnnnnnnnnnnnnnnnnnnnnnnnnnnnnnnnnnnnnnnnnnnnnnnnnnnnnnnnnnnnnnnnnnnnnnnnnnnnnnnnnnnnnnnnnnnnnnnnnnnnnnnnnnnnnnnnnnnnnnnnnnnnnnnnnnnnnnnnnnnnnnnnnnnnnnnnnnnnnnnnnnnnnnnnnnnnnnnnnnnnnnnnnnnnnnnnnnnnnnnnnnnnnnnnnnnnnngcaaggcatgtcatctgcctgttgagattgagcatcgagcctattgggctgtgaagacttgcaacttttccatggatcaagctggtgaggaaaggaagttgcaactaagtgaactagatgagatccgccttgaagcttatgagaactcaaagttctacaaggagaagaccaagaagttccatgatagcctgatagcgaggaaggacttcgaggttggccagaaagttctcttgtacaattctaggctcggacttatgggtggtaagttacggtcaaagtggattggaccttttgttgttactaatgtttatccttatggtacagttgaaatccaaagtgagtccacaggcaagagtttcaagatcaatggacaccgccttaaaccattcctcagcaatccttccttgctggatgcagttgtggaggagatatctctgcttgaccctgccgcccttccatcttccactacaccttacggagttttctttttctttctcctcctttatttttttttatcacacttgtccatatttattgcattattctgtttgctctgaactttggtttgtgccacattgaggacaatgtgtaattttaagtgtgggggtggggagagactgtttctttttgttttgttgttagttttaattcttatcttcttgtgttgttagtttaagtcttatcttgtgtatagttttgcatgtttctttttgatttctgggttttgaataggatatttggcactcacttcactcttagacaagagttgcttcatactatatggtttggaatccatgtttttctctacttggaaagatgattatgaagtttgaaaggttgatttaattgtgacagatataccctgtgtgaggatttgagccactacctgttctttcatgtgtgctatgcctcttgattgcttgcacagttgccttgtcttgactctgtttgatatttcttggttctcatgcatgtttggatatgattaaggcattcttgttttgacaaacctctggccaaataagcttaccctgaatttaattcctttgacaaccctgttgagcctaatttcctttctattgtttgaatctcattacaagccttaagtgaaaaacaattattaccttaaccttagggaactttggagctttggaattgttttgggaataagtgaggggggtgcatgcatatattgttttggatgatgtctctggcctgttggtttactctgatgttcagcttattcttcatatttctatgcatcgtgttatctcagtaccatagtttttctgttccaaaaaaaaaatgaagaaaagaatgaaaagaaacacccattttgtttgaaaataagtatttgaagaaaagttgtgtttgaagcgaaggaaaaggaatggtgttagaggcttattagagattttgggtttgcccttgtgcttacttcttgcttattccccattgctcctctagtttcctctggtttgcagctacttatcccatattttatcctctcccatgtccttgaccacattacaaccctgaaaagaccttttgatccttatatgcatgtttattgggtgttgattatagagacttgccaagtctatctgttgtttgctttcatgagtgttttgagagtatacagttgcctaaacaattgagtgatacagtgtgatacagtgcatctggtgaggttctgttgcttttaattcacctcttgagcggattgattgttttgctaagttttgaatgcttggataaattctataagtgtgtagtctctctgcctttttgtgtgttgaaagttgtcaattcctttctcttttcccagttttcattgaggattgtgtggaactgtttattttatggtgtgtcactttctttaatgtcttgagaattgttccttgctctacttttggattttgcccaggagtgcaaaaggctaagtgtggggggttttgatgagtcactatttatcactatttactcatctttctgtactcattttaatccctagcttgtgcttaatcgtttatatattttgcattgttctcatttaggatttaattagaccgataattcagattttaattaatttggattattttaagtttaattattccaatttttaatttcagggtagattaataattaaatgggcttggaattaatttttggacttgaagattggagtgccacgtcagcatcattttccacatcagcagcttattttcgttttattttattttagtgatttttgggctaaaattgttaggaaaaggcccattcttttgtgagagggagatactatatatttgggaaactgtgcccatgcagggaggacatatacaacactattcacgctcagttttaggatttgagagtattttcgttttctgcttcttctctgtttttagttttttcgttttctgctggtgactatgttttagagtttcgttttgtttgaattctcaattccagtgactatttcgtttctgttccaggtttctgtttcttctaatttcgttttctgctttcaatttcattctctgtttaattcgtttcagttgcgtttctgttgttccgttttcagtatttaggtttttgttatgttacattttgtttcaattcgcgtttctattgttattttcgaattaatggaaggctaattcttagggttggaccttaggacagattgcagaccttcaatggaggttctctgtattgcatttcgtattctgctttgttcttccttgttgggcttctgttctgtattgttttcgaattggagtcatgcttaatgattctgatattgattgatgcagtaatctcaggttgcttaatcctgagagcttgccctgacgaggttcacgtttgcttaattcgtgtaataaagttttaagttaatcttcgcttagtagattaatctggactgataagaattaagtaggacagattatctttcgtgaaccgaggatattagaggcgcaatctgttcgaagggtctgacttgttttaatcactgaaattaattttggtatttctgttttatttttagtattcttgcattctgtcaaaaacctccccattgcacttttaaccccttaacatagacaattggtccttgagagacgacctaggagtcactacctagttactgcatttaatttgtattaatttgaccgagtgcgacctcgcgatcaaattttggcaccgttgccggggaccatcagttttgtttaagggttttgtgtgtgtgtgtgtctgttctgtgtgtgtttgtgtgtttctattttgtttgtgttagtgttgtttttgctttgtattttgtgatcattgttcattgttgcaggtggtagagaagcaaagtagtgtaacaccccaaaattttgtaatcacagtcaaatattagggtgaaatattaactagaaacatcacagaatgatttaagggaaatgacgaaaatacccttggacattttggaaatgaccaaattgtccctaggcattttagtaagatagatgaaggaggaaattttataaatactctgggatgtttagaaataatcagaatacccttaggatgacaattactgagtttccctgaacatttatggaaatgacaatttcacccctaaagtgagtggcaaaattaccaaaacgcccctgggttaaaactgatcaagatgactttagaaaattgtgggaacctgagtatgggatagaatacctttaaatgaccaatgattaactaattaggtgataagaaatcatacaataggatttatatgaattttaatacatattttggaatannnnnnnnnnnnnnnnnnnnnnnnnnnnnnnnnnnnnnnnnnnnnnnnnnnnnnnnnnnnnnnnnnnnnnnnnnnnnnnnnnnnnnnnnnnnnnnnnnnnnnnnnnnnnnnnnnnnnnnnnnnnnnnnnnnnnnnnnnnnnnnnnnnnnnnnnnnnnnnnnnnnnnnnnnnnnnnnnnnnnnnnnnnnnnnnnnnnnnnnnnnnnnnnnnnnnnnnnnnnnnnnnnnnnnnnnnnnnnnnnnnnnnnnnnnnnnnnnnnnnnnnnnnnnnnnnnnnnnnnnnnnnnnnnnnnnnnnnnnnnnnnnnnnnnnnnnnnnnnnnnnnnnnnnnnnnnnnnnnnnnnnnnnnnnnnnnnnnnnnnnnnnnnnnnnnnnnnnnnnnnnnnnnnnnnnnnnnnnnnnnnnnnnnnnnnnnnnnnnnnnnnnnnnnnnnnnnnnnnnnnnnnnnnnnnnnnnnnnnnnnnnnnnnnnnnnnnnnnnnnnnnnnnnnnnnnnnnnnnnnnnnnnnnnnnnnnnnnnnnnnnnnnnnnnnnnnnnnnnnnnnnnnnnnnnnnnnnnnnnnnnnnnnnnnnnnnnnnnnnnnnnnnnnnnnnnnnnnnnnnnnnnnnnnnnnnnnnnnnnnnnnnnnnnnnnnnnnnnnnnnnnnnnnnnnnnnnnnnnnnnnnnnnnnnnnnnnnnnnnnnnnnnnnnnnnnnnnnnnnnnnnnnnnnnnnnnnnnnnnnnnnnnnnnnnnnnnnnnnnnnnnnnnnnnnnnnnnnnnnnnnnnnnnnnnnnnnnnnnnnnnnnnnnnnnnnnnnnnnnnnnnnnnnnnnnnnnnnnnnnnnnnnnnnnnnnnnnnnnnnnnnnnnnnnnnnnnnnnnnnnnnnnnnnnnnnnnnnnnnnnnnnnnnnnnnnnnnnnnnnnnnnnnnnnnnnnnnnnnnnnnnnnnnnnnnnnnnnnnnnnnnnnnnnnnnnnnnnnnnnnnnnnnnnnnnnnnnnnnnnnnnnnnnnnnnnnnnnnnnnnnnnnnnnnnnnnnnnnnnnnnnnnnnnnnnnnnnnnnnnnnnnnnnnnnnnnnnnnnnnnnnnnnnnnnnnnnnnnnnnnnnnnnnnnnnnnnnnnnnnnnnnnnnnnnnnnnnnnnnnnnnnnnnnnnnnnnnnnnnnnnnnnnnnnnnnnnnnnnnnnnnnnnnnnnnnnnnnnnnnnnnnnnnnnnnnnnnnnnnnnnnnnnnnnnnnnnnnnnnnnnnnnnnnnnnnnnnnnnnnnnnnnnnnnnnnnnnnnnnnnnnnnnnnnnnnnnnnnnnnnnnnnnnnnnnnnnnnnnnnnnnnnnnnnnnnnnnnnnnnnnnnnnnnnnnnnnnnnnnnnnnnnnnnnnnnnnnnnnnnnnnnnnnnnnnnnnnnnnnnnnnnnnnnnnnnnnnnnnnnnnnnnnnnnnnnnnnnnnnnnnnnnnnnnnnnnnnnnnnnnnnnnnnnnnnnnnnnnnnnnnnnnnnnnnnnnnnnnnnnnnnnnnnnnnnnnnnnnnnnnnnnnnnnnnnnnnnnnnnnnnnnnnnnnnnnnnnnnnnnnnnnnnnnnnnnnnnnnnnnnnnnnnnnnnnnnnnnnnnnnnnnnnnnnnnnnnnnnnnnnnnnnnnnnnnnnnnnnnnnnnnnnnnnnnnnnnnnnnnnnnnnnnnnnnnnnnnnnnnnnnnnnnnnnnnnnnnnnnnnnnnnnnnnnnnnnnnnnnnnnnnnnnnnnnnnnnnnnnnnnnnnnnnnnnnnnnnnnnnnnnnnnnnnnnnnnnnnnnnnnnnnnnnnnnnnnnnnnnnnnnnnnnnnnnnnnnnnnnnnnnnnnnnnnnnnnnnnnnnnnnnnnnnnnnnnnnnnnnnnnnnnnnnnnnnnnnnnnnnnnnnnnnnnnnnnnnnnnnnnnnnnnnnnnnnnnnnnnnnnnnnnnnnnnnnnnnnnnnnnnnnnnnnnnnnnnnnnnnnnnnnnnnnnnnnnnnnnnnnnnnnnnnnnnnnnnnnnnnnnnnnnnnnnnnnnnnnnnnnnnnnnnnnnnnnnnnnnnnnnnnnnnnnnnnnnnnnnnnnnnnnnnnnnnnnnnnnnnnnnnnnnnnnnnnnnnnnnnnnnnnnnnnnnnnnnnnnnnnnnnnnnnnnnnnnnnnnnnnnnnnnnnnnnnnnnnnnnnnnnnnnnnnnnnnnnnnnnnnnnnnnnnnnnnnnnnnnnnnnnnnnnnnnnnnnnnnnnnnnnnnnnnnnnnnnnnnnnnnnnnnnnnnnnnnnnnnnnnnnnnnnnnnnnnnnnnnnnnnnnnnnnnnnnnnnnnnnnnnnnnnnnnnnnnnnnnnnnnnnnnnnnnnnnnnnnnnnnnnnnnnnnnnnnnnnnnnnnnnnnnnnnnnnnnnnnnnnnnnnnnnnnnnnnnnnnnnnnnnnnnnnnnnnnnnnnnnnnnnnnnnnnnnnnnnnnnnnnnnnnnnnnnnnnnnnnnnnnnnnnnnnnnnnnnnnnnnnnnnnnnnnnnnnnnnnnnnnnnnnnnnnnnnnnnnnnnnnnnnnnnnnnnnnnnnnnnnnnnnnnnnnnnnnnnnnnnnnnnnnnnnnnnnnnnnnnnnnnnnnnnnnnnnnnnnnnnnnnnnnnnnnnnnnnnnnnnnnnnnnnnnnnnnnnnnnnnnnnnnnnnnnnnnnnnnnnnnnnnnnnnnnnnnnnnnnnnnnnnnnnnnnnnnnnnnnnnnnnnnnnnnnnnnnnnnnnnnnnnnnnnnnnnnnnnnnnnnnnnnnnnnnnnnnnnnnnnnnnnnnnnnnnnnnnnnnnnnnnnnnnnnnnnnnnnnnnnnnnnnnnnnnnnnnnnnnnnnnnnnnnnnnnnnnnnnnnnnnnnnnnnnnnnnnnnnnnnnnnnnnnnnnnnnnnnnnnnnnnnnnnnnnnnnnnnnnnnnnnnnnnnnnnnnnnnnnnnnnnnnnnnnnnnnnnnnnnnnnnnnnnnnnnnnnnnnnnnnnnnnnnnnnnnnnnnnnnnnnnnnnnnnnnnnnnnnnnnnnnnnnnnnnnnnnnnnnnnnnnnnnnnnnnnnnnnnnnnnnnnnnnnnnnnnnnnnnnnnnnnnnnnnnnnnnnnnnnnnnnnnnnnnnnnnnnnnnnnnnnnnnnnnnnnnnnnnnnnnnnnnnnnnnnnnnnnnnnnnnnnnnnnnnnnnnnnnnnnnnnnnnnnnnnnnnnnnnnnnnnnnnnnnnnnnnnnnnnnnnnnnnnnnnnnnnnnnnnnnnnnnnnnnnnnnnnnnnnnnnnnnnnnnnnnnnnnnnnnnnnnnnnnnnnnnnnnnnnnnnnnnnnnnnnnnnnnnnnnnnnnnnnnnnnnnnnnnnnnnnnnnnnnnnnnnnnnnnnnnnnnnnnnnnnnnnnnnnnnnnnnnnnnnnnnnnnnnnnnnnnnnnnnnnnnnnnnnnnnnnnnnnnnnnnnnnnnnnnnnnnnnnnnnnnnnnnnnnnnnnnnnnnnnnnnnnnnnnnnnnnnnnnnnnnnnnnnnnnnnnnnnnnnnnnnnnnnnnnnnnnnnnnnnnnnnnnnnnnnnnnnnnnnnnnnnnnnnnnnnnnnnnnnnnnnnnnnnnnnnnnnnnnnnnnnnnnnnnnnnnnnnnnnnnnnnnnnnnnnnnnnnnnnnnnnnnnnnnnnnnnnnnnnnnnnnnnnnnnnnnnnnnnnnnnnnnnnnnnnnnnnnnnnnnnnnnnnnnnnnnnnnnnnnnnnnnnnnnnnnnnnnnnnnnnnnnnnnnnnnnnnnnnnnnnnnnnnnnnnnnnnnnnnnnnnnnnnnnnnnnnnnnnnnnnnnnnnnnnnnnnnnnnnnnnnnnnnnnnnnnnnnnnnnnnnnnnnnnnnnnnnnnnnnnnnnnnnnnnnnnnnnnnnnnnnnnnnnnnnnnnnnnnnnnnnnnnnnnnnnnnnnnnnnnnnnnnnnnnnnnnnnnnnnnnnnnnnnnnnnnnnnnnnnnnnnnnnnnnnnnnnnnnnnnnnnnnnnnnnnnnnnnnnnnnnnnnnnnnnnnnnnnnnnnnnnnnnnnnnnnnnnnnnnnnnnnnnnnnnnnnnnnnnnnnnnnnnnnnnnnnnnnnnnnnnnnnnnnnnnnnnnnnnnnnnnnnnnnnnnnnnnnnnnnnnnnnnnnnnnnnnnnnnnnnnnnnnnnnnnnnnnnnnnnnnnnnnnnnnnnnnnnnnnnnnnnnnnnnnnnnnnnnnnnnnnnnnnnnnnnnnnnnnnnnnnnnnnnnnnnnnnnnnnnnnnnnnnnnnnnnnnnnnnnnnnnnnnnnnnnnnnnnnnnnnnnnnnnnnnnnnnnnnnnnnnnnnnnnnnnnnnnnnnnnnnnnnnnnnnnnnnnnnnnnnnnnnnnnnnnnnnnnnnnnnnnnnnnnnnnnnnnnnnnnnnnnnnnnnnnnnnnnnnnnnnnnnnnnnnnnnnnnnnnnnnnnnnnnnnnnnnnnnnnnnnnnnnnnnnnnnnnnnnnnnnnnnnnnnnnnnnnnnnnnnnnnnnnnnnnnnnnnnnnnnnnnnnnnnnnnnnnnnnnnnnnnnnnnnnnnnnnnnnnnnnnnnnnnnnnnnnnnnnnnnnnnnnnnnnnnnnnnnnnnnnnnnnnnnnnnnnnnnnnnnnnnnnnnnnnnnnnnnnnnnnnnnnnnnnnnnnnnnnnnnnnnnnnnnnnnnnnnnnnnnnnnnnnnnnnnnnnnnnnnnnnnnnnnnnnnnnnnnnnnnnnnnnnnnnnnnnnnnnnnnnnnnnnnnnnnnnnnnnnnnnnnnnnnnnnnnnnnnnnnnnnnnnnnnnnnnnnnnnnnnnnnnnnnnnnnnnnnnnnnnnnnnnnnnnnnnnnnnnnnnnnnnnnnnnnnnnnnnnnnnnnnnnnnnnnnnnnnnnnnnnnnnnnnnnnnnnnnnnnnnnnnnnnnnnnnnnnnnnnnnnnnnnnnnnnnnnnnnnnnnnnnnnnnnnnnnnnnnnnnnnnnnnnnnnnnnnnnnnnnnnnnnnnnnnnnnnnnnnnnnnnnnnnnnnnnnnnnnnnnnnnnnnnnnnnnnnnnnnnnnnnnnnnnnnnnnnnnnnnnnnnnnnnnnnnnnnnnnnnnnnnnnnnnnnnnnnnnnnnnnnnnnnnnnnnnnnnnnnnnnnnnnnnnnnnnnnnnnnnnnnnnnnnnnnnnnnnnnnnnnnnnnnnnnnnnnnnnnnnnnnnnnnnnnnnnnnnnnnnnnnnnnnnnnnnnnnnnnnnnnnnnnnnnnnnnnnnnnnnnnnnnnnnnnnnnnnnnnnnnnnnnnnnnnnnnnnnnnnnnnnnnnnnnnnnnnnnnnnnnnnnnnnnnnnnnnnnnnnnnnnnnnnnnnnnnnnnnnnnnnnnnnnnnnnnnnnnnnnnnnnnnnnnnnnnnnnnnnnnnnnnnnnnnnnnnnnnnnnnnnnnnnnnnnnnnnnnnnnnnnnnnnnnnnnnnnnnnnnnnnnnnnnnnnnnnnnnnnnnnnnnnnnnnnnnnnnnnnnnnnnnnnnnnnnnnnnnnnnnnnnnnnnnnnnnnnnnnnnnnnnnnnnnnnnnnnnnnnnnnnnnnnnnnnnnnnnnnnnnnnnnnnnnnnnnnnnnnnnnnnnnnnnnnnnnnnnnnnnnnnnnnnnnnnnnnnnnnnnnnnnnnnnnnnnnnnnnnnnnnnnnnnnnnnnnnnnnnnnnnnnnnnnnnnnnnnnnnnnnnnnnnnnnnnnnnnnnnnnnnnnnnnnnnnnnnnnnnnnnnnnnnnnnnnnnnnnnnnnnnnnnnnnnnnnnnnnnnnnnnnnnnnnnnnnnnnnnnnnnnnnnnnnnnnnnnnnnnnnnnnnnnnnnnnnnnnnnnnnnnnnnnnnnnnnnnnnnnnnnnnnnnnnnnnnnnnnnnnnnnnnnnnnnnnnnnnnnnnnnnnnnnnnnnnnnnnnnnnnnnnnnnnnnnnnnnnnnnnnnnnnnnnnnnnnnnnnnnnnnnnnnnnnnnnnnnnnnnnnnnnnnnnnnnnnnnnnnnnnnnnnnnnnnnnnnnnnnnnnnnnnnnnnnnnnnnnnnnnnnnnnnnnnnnnnnnnnnnnnnnnnnnnnnnnnnnnnnnnnnnnnnnnnnnnnnnnnnnnnnnnnnnnnnnnnnnnnnnnnnnnnnnnnnnnnnnnnnnnnnnnnnnnnnnnnnnnnnnnnnnnnnnnnnnnnnnnnnnnnnnnnnnnnnnnnnnnnnnnnnnnnnnnnnnnnnnnnnnnnnnnnnnnnnnnnnnnnnnnnnnnnnnnnnnnnnnnnnnnnnnnnnnnnnnnnnnnnnnnnnnnnnnnnnnnnnnnnnnnnnnnnnnnnnnnnnnnnnnnnnnnnnnnnnnnnnnnnnnnnnnnnnnnnnnnnnnnnnnnnnnnnnnnnnnnnnnnnnnnnnnnnnnnnnnnnnnnnnnnnnnnnnnnnnnnnnnnnnnnnnnnnnnnnnnnnnnnnnnnnnnnnnnnnnnnnnnnnnnnnnnnnnnnnnnnnnnnnnnnnnnnnnnnnnnnnnnnnnnnnnnnnnnnnnnnnnnnnnnnnnnnnnnnnnnnnnnnnnnnnnnnnnnnnnnnnnnnnnnnnnnnnnnnnnnnnnnnnnnnnnnnnnnnnnnnnnnnnnnnnnnnnnnnnnnnnnnnnnnnnnnnnnnnnnnnnnnnnnnnnnnnnnnnnnnnnnnnnnnnnnnnnnnnnnnnnnnnnnnnnnnnnnnnnnnnnnnnnnnnnnnnnnnnnnnnnnnnnnnnnnnnnnnnnnnnnnnnnnnnnnnnnnnnnnnnnnnnnnnnnnnnnnnnnnnnnnnnnnnnnnnnnnnnnnnnnnnnnnnnnnnnnnnnnnnnnnnnnnnnnnnnnnnnnnnnnnnnnnnnnnnnnnnnnnnnnnnnnnnnnnnnnnnnnnnnnnnnnnnnnnnnnnnnnnnnnnnnnnnnnnnnnnnnnnnnnnnnnnnnnnnnnnnnnnnnnnnnnnnnnnnnnnnnnnnnnnnnnnnnnnnnnnnnnnnnnnnnnnnnnnnnnnnnnnnnnnnnnnnnnnnnnnnnnnnnnnnnnnnnnnnnnnnnnnnnnnnnnnnnnnnnnnnnnnnnnnnnnnnnnnnnnnnnnnnnnnnnnnnnnnnnnnnnnnnnnnnnnnnnnnnnnnnnnnnnnnnnnnnnnnnnnnnnnnnnnnnnnnnnnnnnnnnnnnnnnnnnnnnnnnnnnnnnnnnnnnnnnnnnnnnnnnnnnnnnnnnnnnnnnnnnnnnnnnnnnnnnnnnnnnnnnnnnnnnnnnnnnnnnnnnnnnnnnnnnnnnnnnnnnnnnnnnnnnnnnnnnnnnnnnnnnnnnnnnnnnnnnnnnnnnnnnnnnnnnnnnnnnnnnnnnnnnnnnnnnnnnnnnnnnnnnnnnnnnnnnnnnnnnnnnnnnnnnnnnnnnnnnnnnnnnnnnnnnnnnnnnnnnnnnnnnnnnnnnnnnnnnnnnnnnnnnnnnnnnnnnnnnnnnnnnnnnnnnnnnnnnnnnnnnnnnnnnnnnnnnnnnnnnnnnnnnnnnnnnnnnnnnnnnnnnnnnnnnnnnnnnnnnnnnnnnnnnnnnnnnnnnnnnnnnnnnnnnnnnnnnnnnnnnnnnnnnnnnnnnnnnnnnnnnnnnnnnnnnnnnnnnnnnnnnnnnnnnnnnnnnnnnnnnnnnnnnnnnnnnnnnnnnnnnnnnnnnnnnnnnnnnnnnnnnnnnnnnnnnnnnnnnnnnnnnnnnnnnnnnnnnnnnnnnnnnnnnnnnnnnnnnnnnnnnnnnnnnnnnnnnnnnnnnnnnnnnnnnnnnnnnnnnnnnnnnnnnnnnnnnnnnnnnnnnnnnnnnnnnnnnnnnnnnnnnnnnnnnnnnnnnnnnnnnnnnnnnnnnnnnnnnnnnnnnnnnnnnnnnnnnnnnnnnnnnnnnnnnnnnnnnnnnnnnnnnnnnnnnnnnnnnnnnnnnnnnnnnnnnnnnnnnnnnnnnnnnnnnnnnnnnnnnnnnnnnnnnnnnnnnnnnnnnnnnnnnnnnnnnnnnnnnnnnnnnnnnnnnnnnnnnnnnnnnnnnnnnnnnnnnnnnnnnnnnnnnnnnnnnnnnnnnnnnnnnnnnnnnnnnnnnnnnnnnnnnnnnnnnnnnnnnnnnnnnnnnnntggatgtgtagtggtttgtatgccatggactgtatattatgaatatgtgatatatgtctgtttagacgaacgctatggctatattaggtaattacgcgtacatttctatatgtttgggaagctgtgttgaaacttcaccaatttaatttgaagttttggttaatattattattaatgtttttagaaaatttaaaagaaaaggaaaaattttaggcacaaatgaaaaataaaagcgaaataaaagcgggtgtttcaattgtgtacgtctcaaaaagttattttaaaaacttaaccaatttaatttggattttattattattattattaaaatcattttttcgaaaaaaaaataataaaagaaaaagaaatttttcagttacaaattaagaaatcaaaagcaatcgttttaaaatgaatacgtaatagaagcgggtgtttcaagtagcattcgagtattaaggtctattgtatactcagtgtatttataacaataattgaatattttaaaaatgaaataatttgaatgctaaaatcaagaatattacgaattaccttaatttgtatatgttttaattttgaatcagaatataaactaatattgtcaattaatctaaatcaatatatgataatttgttattatcattgtcattcattaggttggtatttaaggaaatataataattttatatcgcgnnnnnnnnnnnnnnnnnnnnnnnnnnnnnnnnnnnnnnnnnnnnnnnnnnnnnnnnnnnnnnnnnnnnnnnnnnnnnnnnnnnnnnnnnnnnnnnnnnnnnnnnnnnnnnnnnnnnnnnnnnnnnnnnnnnnnnnnnnnnnnnnnnnnnnnnnnnnnnnnnnnnnnnnnnnnnnnnnnnnnnnnnnnnnnnnnnnnnnnnnnnnnnnnnnnnnnnnnnnnnnnnnnnnnnnnnnnnnnnnnnnnnnnnnnnnnnnnnnnnnnnnnnnnnnnnnnnnnnnnnnnnnnnnnnnnnnnnnnnnnnnnnnnnnnnnnnnnnnnnnnnnnnnnnnnnnnnagcattctctataaaaatcattttcctatatatacagtatcaagtatagatagattaggactatattcaatttttattcttaattatttcattcctttttagtattttttaataatgattataatattatttaggttaaaatataatttatgttcctatatattttcaaatgagtgattttgatgatctcatcttttaattgagatattttattccttacttttaaaatatttatgattataatctctcattttttaactgtttattatccacacaacaaatattttttttaattatttaattcttaacaagcttaatttattaaaaaaaaagaattactatagtacacagtcaaatatgaaattgattagtaaggggactaaaatagcatattttaaaaaatgagagataaaatatcttaattaaaaaatatgaaaagtaaaatggtgaattttttaaaattggacacacaatgtgttaattaaaaataagaaaattaaaatcacatatttagaaataatgagacaaaaattatattttaacctattatttaataacataatatgagaaatgatcaatcaatttattttattcttttttagtattttttagtttacaatcactactataaaaagagtattttacgacgcaccttctaagacggttcctaaaaaaccgtcttagaatgtgaggcggtggcaattttgtaaataaaaagagatgtgcaacaacggttttataatgactgttttagaaggtgagtgaatcaagtatacaaagacgattttatcataaccgtcttaaaaattaatttataagaaaatattcaaagacgtttttgaaagaaagccattttaaaatttgaacacttaaaacgggtttaaaattcttaccttctcctttcatcatgccctcccgttttccctgcaccatccacaaaacctagggtttctctttttctcccttcaaattccatcacttcctatcatggtcatctttcattcctcttccattgattctccgaaaatgaacattaatgtatcttttttagaaacaattatatactgtgttttaattattataatcaatcactaaaccaaatcaattttttatattaaaccattttgatgttaatagtagatattacaatttttattgcaatattgttgaggatcatattaattgtaaatatcacaatatatatatatataataaaaataagtataaaagaatttgctttttgttttataaactgatgtttcgtgatagttccatatttatttcctttaaaattaattaagtgaaattattcaatttttaatttaaataaacaaaatataattatgataaatagtataaacgttaaccgtgtaaatcatatcatccagatttgatttgataatgtgtgtataataaacatatattctgatttttttattaaatatagaattccgtaaatcaattattattatttttattattattattatttactgacattaatattattatttttcatttgaattttaaatttacatcaattagtattaaatgattgtttcaatacttaaattgtattgcaaacatgcaaacttatactttcaaccatttatctctttttctagttatttctcacatcagtctcacttttattagaaaaatattttatttttagttaaaaaaatatattaagctatatcagttttacataacaacgataaattcatgttttttatattatgtaattaaaaattataagaatgaaatacaaaaaatattaaatacatgaatgatatttaaaccttaattaataaaaatatgctcaaatattaaataacatttaaattttccataataacattcatccgtttcaaatactttttttcttaattattaaattaaagaatattttatattttaaattaacttatttaatttgattaatgttcaaattttatgaaatacgaaattttattaaaacacatacttgatgtatgtatgtaaaaatattgtatagatcatacacatatctggacttaatttttataccatttaatattttattatatattaatatcataactattgtgtgtatatatcaaactaatatacatttttattaattaaaatataataaatatagaggtgttcgtggatcggttcggatcagttttggccaaactcaggacttaacacaaaatttaattggtttagttcggtttccaaaaaaattttttgaaacccaacccaagctaacttgttcatgaacggtttagtttggttcaagccaacgggtcacccatttaaatttgatattttttttagaactactattttatatcatgattcatccaaatatccaatataattaacacaatagggtaaatagtcattttcgtccatgaatgtgtagagactggacaaatttgtccccaaaagatgaaaattcaaattttagttttcaaaattgaaaaaagtgcgataaatctattcatccgttaactttcgtccattaactttcatccgttaccattaatgaaagagcctacgtggcacagagggaccaaaatatcacaaaaatgattgtcaacatggctgcagaatagattggatcaaaatgttaataaatttccatttgaccaaaatattagtaagtttcccttggacaaatttgttagattcgaaatttcgtttcatgtaaaggtaaaatgcaatttagggtaaatagtcattttcgttcctgaatgtgtaaaacgctaactgagagatggaaactcaaattttagtatatccatttacattgcaaatttactacaactatttgtttgtcatatcagatcattggcatattgttggaacataatagaatcataggatatttttatgcaatgaaaacttattgacattttggtccaatggaaacttactaacattttggtccaatctattcagcagacatgttggtaatcatttttgtgacattttcgtccctatgtgccacatagactattttattaacggtaacggatgaatgaatttgtcgcacttttttcactttcaggactaaaatttgaaatttcatcttttgatgacgaatttgtcagtaatctacacattgagagatgaaaatgactatttacactaataaaatattatcaaatgtctgaaagtaacaaaattgatttcatttaataccattaacataatattctaaaatagactaatacaaattaaaataaaatattctttaacgatatttactatattagtctgaatcacaattattttctacaaattaatttcttgtaataaactttggtgcaaccatatttgttacaaccaaatttgctgaagcaaatgaacaaaatatgatccgttaatattataaacatttgcagttccaacatttagagtccaatattaacaatactaaaaaccaaacataacacctcaaaaaaaaattatttgttttgatcggttcagttcgattttgattgaatctatagatctaaactcattacccaatatgtacattaacggttttgatcggttttattcgattttgacccaagtacataaatgacccaacccaaactgtctagattaatttggatcaattcgggttcacaagtgactcgtacccttaaacaccccaaaataaataaatatattaataagttataatatatgaaaaaaattataaattataaaattaataccagcagagcactaagctagttattattcttataaaaaaagaaccaacccgaatgtttgagctaaccattgtaataatactgcaagcgtgtccatcagcaaatttctttcccttttaatcttcatctatgaaaaccattccttttattatctggcttcgggaatcctgcaattttttcaaagatatgtttgaaatatagctatttgagtaacattttctattttgctttgtaaaattgaaagtgcgatatcgagggttagaaacttgttcacaaaagttataatatatgctttataaaattgttcaaatttcactcccaccatggccaccaacctcttcggtgttctctcagaatgtaatcgcatcatcaaaaaccgttctcgtcactttagcattcttttcctcatcttcctcttaccaatttccttctccttccaaattttcattttcttttccagcatcactcaaacacaacaacaaacgttacaaaccaccaaccgccccctcttttatctcctattatactttattttcgttttggtcttctacacctgtgccctaagcagcatcacctacagcgtttacgactacttctatggtagacccgtgaagcttctatccgccgtcaactccattttttcttcctttttacccctccttgcgacagtgttattatctttaccatcttgcttttcattagggtttctcgccatagtagggtttgagattgtcgatgtaacaagattacactcttaccctttattctttgttttgcttcctttgatgttgtatttgaaagttaattggaccttggcgccagtgatagtggtggtggagtcacgttggggtttggagccctttaggaagagtgtgaggttgatgaggggaatgaaaggggtggctctatctcaatcgttgatctttgggttctggttatgcatatgctcacatttgactaagggcatttatggaattacatatgatgactggtttaatgggctaataataggggcgagttcttgtttggttgctacttttctgcttaaagacattgctgcttgtacagtcttgtacatatattgcaaggctaatcatggtgagcttgagggacagtttgggaaagattatgttagcttttcatcccccgatggagatatttgtgtcaaaaaagaaaatagagaagaaaaaaatttatagataattgtctttttttccccatttacttaaaaggaaaattgtattgttaaacaaataacgattgacacaagtggtagtgacttgtgtcccttaatcaagtgttttaagtattgaatcctaattagtccttgcgtgtgaaaatatcatgttggacaggaaatacctaccttgagtgcactcacggtttcggacgaaaatttatcactactttcgacaagaggaactttgtagcaataccatgattaacaaaaaaaattgtcttgttaataaattcattttcgtttacttttttatttttcaatttgaattttcatattttttcttttattattgtccaactgcctaacaaccaacactagttgaatgcattatttataataataattaaatccattttaaaaaggaaataattaaatttccaaatctcatgaatatcccaaattagaatgatgattatacttaaataattaagaataataataaattgaatccacaaatgggttatattattctatttactttaattatgtgtttttaaaataatatctaatttccatacgctacttattttaattggaattttaatttttaaattatatattgtaattagttttatatatttttcataggatactccagtaaaaaaaatttcataggatactagactagaggtaatattttatcaattaaatattactaatttaagtgatgttgatgtattttccttacctgagattgttttaattgtatatctgaaacaattacataattaagttaattgatttattgttaattttaattgaaagaattatattgatgtgtttccgtgacttgttattctaattgtatgattcaaacaactacataattgacattaatttacttattgttaattttaattgaaagaattatatatactaatatatgtttcaatgtcttttgttacaatgatatatttctaaatttaattttacttgatattatcctaaaatttactttttatatttgttatatctattttccgagattttgcataaaaagccattattttactaccaataaaaaattgattatatggatttttttatagaactgtttatatggattgcaagcaataatggttataattcctaaaaaggaaaaatattagatgttgattggtgggtaacaataatagattgaatggtaggtaacaataatatgttgacgaaaaggttgtaattgacacaataaactcattgattgaatataataatatatttttttgactgaaatttataataatagatatatttttaaatggattgattgaattgaatcttcaaatcccagcgaatggattggtcagaatcatcaaatagattaataaattaaatatgtaaatagtggttataattaccttagttgaaactccacctatgtgtgtttgcatgcatggtatatcccaagtcaagataaaggaagagggttggcatcaagggttgcgaaccggctgtaaataaaaccagttatttctatgtgataaaccttcatgatattttgttggggcgtatccttcatagtgatgcgttacatctgaccccgggtgtagcgaaaaatgagctagggtccttgccacaaggcaagacactacatcgatcccgggatgtagtaaaaagtgagctagggtccaggctaaaaggcaaggcgccatgtcttcacccggatttggtgacaaataggcaaggatcccaacacgcagatgggcgagtgtggcgggcaaacaccgcccaaaggtttaggatgaaattgggaagctagaacataggaactttaacgagtaaactgagggagttagcagatgtttttgtcagaaggaaagttaatattgtttgcttgcaagaaactaagtgggttggagaaaaggccaaggaagtggagggcaccggtttcaagttgtggtatacaagtataaccaaaagtcgaaatgaggttggtattatgattgatagatgtttcagagataaagtcgttgacgtcaaaaggaaagacgaaaggattatgctgattaagcttgtagcgggaatctaattttaaatatccttagtgtgtatgcaccccaagttggactacatttaagtgaaaaaaaccaattttgggaagacttggaggaggttctgagagggataccacgagaggagaagatttttctaggaggagatctaaatggtcatgttggtaaaaacagtggaggttttgatagaattcatggtggttttggctatgggataagaaatgaaattggagaagatatcttgaacattgtactagcctatgatttgatgctagtgaacactttttacgaaaaagggaatctcatcttatcacgtatcatgatggccaaaattatagtcaaattgatttctttatggctagaagcgaagatagaaattcgtgtattgactgtaaggtctaccctggagaatgtgggcgacacaacataagttggtagttctagaggttaggttcaacaaagttcttaatttgaagaaggctcaaaacccaaggataagatggtggaagctaaaggaggagaaacaaatagagtttaatgaaaatttgttgtgtgaaggatcatgggagtttattggagaagctaatgaaatatgaaataagatggctatgtgtgttcaaaatgtgggaaggaatgtgctaggagaaagcaaagaaaacaaagttcttacaaaggaaacgtggtagtggaatggagaggtgcaagaggctattaaacagaagaatgaatgttttagatctttgcataaatatccaaatgatgagaatttgcaaaaatttagagtagtgagaaaaaatgcaaagaaagcagtatgggaagctagaggtaaagtttttgacgatttgtataaaaatcttaggagcaaggatggtgaaaaagatatttacaaacttgaaaaaatgagggataagaagagtaaagacctcacccaagttagatgtatcaaggatgaaaataaaaattttttggtaagggatgaagatgtaaacgaaagatggcttaactactttaacaaaatttttaatgggaatgacgacaagagtgaggtagatttggaggacgtttcttatgatttgaatagaagatttgtgcgcagaattaatacacatgaagttatggagactttataaaggatgaagaatatataataaagctttgggacccgatgacatctctattgaagagtggagaggcttggaagatgtgacagtaaaatggttgatcaatctattcaataagattcttcaaacaaataagatgcctgatgcttggaggaaaaatttgtttatgcctatttacaaaaacaagggagatattcagaattgttctaaatataggggcatcaagctcatgagtcatactatgaagttgtgggagagagatattgaatattgtctaaggagggagaccaaggtttccgtaaatcaatttggatttatgccaagaagatgtaccatggaagctattttcttgatgcaacaattaatggaaaggtatagggaaaagaagaaagacttacaaatggtgttcatagatcttgagaaagcatatgatagggtcccaagagaagtcttatggtggactcttgagaagaaaaagatagcattaaagtatgttaatgaaataaaggatatgtatgatggggccaccacatgtgtgaaagcttgaaatggaacatcaatgtatttttctatcacggtaggtgcccaccaaggttcagctcttagtccttatctctttgtcttagtgacgaatgaactaacgagagatattcaagaggaagtgtcgtggtgtatgcttttggcagatgatatcatgcttattgatgagaccaaagatggtgttaataggaaactgaaattgtggagaaacactttggagtctaaaggattcacgataagcaagagcaagacggagtatatgaagtgtgacttttcgcgggtaagagatggtgatcaagacacactgcatctacttggtgaagaggtacccaagaaagatgtttttagatacttgggatcaattttgcaaaaaggtggtgagattgatgaggatgtaaaatcatagaatcaaagaggggtggatgaaatggcggagtgcatccaggtttctgtgtgaccgcaaaattccccttaagctaaaaggaaaattctatagaacagttataagatcggcaatgttatatggagcagaatgctgaccagcacataggcaatatgagcataaaatagggatagcagaaatgaggatgttaacgtggatgtgtggttattaggggtagcaaagtggaccggcccaccaaaaatgggccggactggtcctagcccaccaaaaatacaggccggcgcggggctagcccacttttgcaaagtgggatggaaatgctaccccgccccactttaagatgggttagtgggccaacgggccagcccacttaaaaaataaaaaaattaattttctttaaataaaaagacaaaaaaaattattaaactaaaacacttattggttaaacaattaatgcataattgatgttgaggtggtggatatccaaagttctaattgaacaattataattaatactaataattagaaagtcttgaccactgattttctaatcaatgggctagctgcactttaaactctaaagtttatccttcttactttttagacaagctaaatctcaaaactagacttcaccatcagtatgtaggttcaaaaaatataaaaaaaaggatgaaaatatagagatgccatcagctgaaccattgtatcagcatacaacatatgtgttgttattgtacaagtttttagccaccattcatatcatatatagcacatcaattatcccaaactcaaccttttgatactcaaatttcagtaatgcctaaaatgtttattttcaaactaagtcacatgttataacttcacattaaaaaaattaacagaattcaacttccgacaatataatcaatgataaattcagctgccacttgcacttttgaaactgtcataaatcaaacattaaacgaaaaaatatataacaaacaaacattggctccgagattatatcatacttcatacttgcactaatatacttatatttctcaattctaaataggacaactttaaagagacagaaatgcttataattaaaaaaatgaaaagcaagcagctagctaggggagatagaaaagcaaaggaagaaaataaaaacatgaaaggaagaaagaaaacaaaagaaaaagagaccctatttaggcttggttggaacaacatcaaaaaagagaaaggagagactttcttttctcttttgtagatccagatcgtagaaattaagaaaggcgtgaatagaggtgttttgcaaagctcattggtgcaacaaatgatgaccacgatgagccgatgacgaagtgcagacagcagagctcaaacggtgccaccgtgccggaagcaggaaggacgaaggcggaagctcggacggacggtgacgaaggtgcagaggtgccgccgtgccagaagcaggaagctcaatctctttactctctcgagtctcgtctcaacctccctctctcactctactctcattcagttattctcaaccactcaaatgactcaatatctaatatctttctaatttttttatttttattagaggcagcaggctgcagacaaaaatgattaaataaaatgaggcaccagcgtagaccgtagagcactagagcgtggactgcgtgtgtattgtttcatttgtttggtgggctataggcctggtgggctggcccggtctaggaccgattttggcccacattgcttgtttactcaatatgggttcataatttcaacccaacccacatttttttgtgggttaaatgggctggcccgatgggccgacccgttttgtcaagcctagtggttatacgaagatggataagataagaaatgaggatattcgatgaaagtatcagtggtaccggtatgtgaaaatatgagggagcatagattgaggtggtttgggcacgtcatgagactgccactggatgctcccataagaacaagagtttgttttcaaaagctcgacacaaagagaggtagagatcgactgaaacttacctgggaaaggtaattaaacaagacctaatggagtgagatatagattggcggacggtatgttttaggatggagtggagaaaagctataagcttggtgaaaggttaaacccattagtagttctatgttctagttgttcccttttttagttcatttcctcttctgtccttctcctttcaccccccttttattttagtttatttttttctctcttttgtcttttttccactttttcttcccctctccctttctctttctttatcttttttccgatttatcgttgagttcatctaccattaactctaattaacttggattaaaggtgttgttgatgttaatgttgagttactttagttgatttgatgatacattttcatgaattaaaaaaggttaaatgtaatttggtattgctatctaaattgatgtgttaaccattaaaaataatgttgactattataacttttttttttgtataaataaagttgaaatgtcttttaattaaaaaaaaatgaatttttaacggtgaaaccctagatttcactcatcccagaggttaagaagcctctgcttggagcattggacacagggacactgacgacacacgagaacatgatgtgggcgggtcttcatttcttgcataaagagaaaaacaagcggttgagcgctggagacagtcaacaacagtgaggacattgtccacggcgattatgatgtcgacattggtgtcggctgagcgctgtgttggtggatggagggggattcttgtgctaatggagattgtggaggtgggacgcaaaggcagaagaagattgcatcatgatggtttacgactgagctctagtggctttttttcttgttttttggttcttactcttgttgtctcatttgttaattgacctttttcttgattgacctcaagtgaaataggacaagtgtatgatttctattggccattgaaaatgggttagggttaattaacctcattttcacttgggatcaattagacaagtcgatgtttgtttcttcttttgagttcgaaagttgtgtcaatgctggggtttggtttggaagttgtgagttatggaattgaatggtgaagcaaggtggtgtgataaatggaggttatggtagatggaggtgaagaactgaacctacccctgctcttggagatgagtttcaattttgaagatttgggcaaaccagtacaacgattaccttcatttttttgtctttttatttattttttacttttaattaaaatacatttcagtttattaaaaaaaaaatataaatgatggacgacgattgatgttaacttgaaaagtcaatacattaatttgaaaggccaggaccaaaatcaatgatttttcaaacaagtgaaactaagggtctttttaaattaggaaaaccaaaattgcattcaatccaattaaaaatgaaaaaaatgttatttctatggcaaaattaatttgaggtagtgccatgtcactactagaaatatcctatttcacgacagcgtttcaaggacggttataagaaaaccgtcttagaaaaaggggcggtgtcatttttgtaattaattgaaatcgataacgacggtcctatgagaaaaccgtattcaactcgttgaggctacttgaacaaggacggcttctctgaaaccgtcatggttttgttgtgtagaaattaaaaggccactatcaaacaccacacaccactgtcagctcccaagcctcattgccctaaaacatcactgttgcgcccaaaccttcctcctggacttccccaacatcatcctcgtcggcatcagctggtccgtccccaaaccttcctcctggacttccccaaccgaacagcgcctctactcctccaagctcctccatgtgctccgccgcaacaggaaccctaccgcttcccgcgaagttcggcaccggcttcatcctgatcctccttcgaaggccaactgctttttgagatgtgaatcggcaacttcttgtagcccaatgagtccaacgcagaatacaccacatcgatctacgtgaaaagcatgttatcgaggttagggaggtgcggcatggacgctctacatggctgctggaaggaggtatgtcctgatcctcctttgaaaatttcagtctggtgaagatatcagatttctttgaatttggaaagaaatcattatctgaaaaagtgaaacccttgctcctatctttatatttaaaagtcacaccgaacgagtttaatagcttaatttgagcactttactttctgaaatatggaaattacaggttgcaggatgcaatattgtcacaacaaatttcaagttagcctgtttttatgtaggagtgatgaaattggaagctacaaaatttcggccaagagaggtagtcaagcatatatattaaaattaagtaggtgaatcctataaactctttgctgtctattgctgttaggccattagccatggcagattgtaccaaagaagtaaagaattttattatgttacataaaaaaaggataatgtaattactagttacatacaattatccttgtttcttaatttctcattcacctacctaccttagttttatttggcagtgttccaaaaatattatagtgtatacatttgtgtcgtggtaccacatgttgaagacgtcaatccttggcaaacatgtgagtagtgtaagccttgttttttttttttttatctatccaacattatatataaagaagatagccttgcaaatgaataaagacaaatcaattttgtggctttgatgctgaaagttttggttcgatatcatgatgacttaacatctggtctaataaaggtcatcattagttgctagttcatattagcttgctaaaatttagagtgtaaactattaatcacttttttatttttcgtatatatacagtaatattatgaatgatgaattatagataaggattggtgtaatttcatatcttacatattgaattattacatcagataagactttctaatttgttgctctagaaacaagtgcatcagaaaatgaagaactaaacaagatttggaaccctctgccaaatcacaattctggtgtcatagcttgcctaagagctaacaggtccctctttcttctctgtttctctttttcttttttctttttttaagcagttgaaaataaagagtgttttcgatgaccttagaccatttaattatttctttggttatttctctagtagaataataacaatatgcatgcatatatgtgatggggttgatagggtggtcgactgaaatttgacgcacagatagatagttttgcaaataccaggcaagacatcatatccagcattggtgttccggcggctcttaatctactcaaaagggcattgttcactgtcacaataggctcaaacgatttcataaataactacctagcaccatcactcacattttctgagcggaaatcggcgtctccagaaatctttgtgaccaccatgatatcagaactcagagttcagctcactgtaatatatatttctcagcattataattttataaggtccaatattttttgtttctaaatatttctcctagaaaattttaattggtgtaatagtaatacgtatattcattaacatttttctaccacatgcagaggttattcaaccagggagctagaaaatttgttgtggcaaatgtggggcctgttgggtgtataccaagtcagagggatgcaaacccaggtgcaggagatagctgtgttgctttccccaatcagctagcacagttatttaattcccagttaaagggccttattacagatctcaactcaaatctggagggtgcagtgtttgtttatgcagatgtctaccaaattttacaagatattctccagagttatgtagcacttggtatatatgtgtctatcttaattgtttggctgttatttaatctattaaaaccttgaatttgcaagttggttttgaactaatcaggacactattttgatgtgtgtgcacaccacacgtgtggtaggttttgataattcattttctgcttacataaaaagaaatgggttatgttaatccttttgtcttctattgtatgacttcacattttcttatacattcttctggtggcatgtggtgtcaaaggggcttattttatgaatttattttataaaatgtgatgttagatctctcagtcctactatccttttacagtgggtcatggttgctttaattaaaaaccgtcataattgctcgaagttcaggatttatatattattaatcggtagattgttttggataatcgatcagtaatatgctcataaagagagagcatacataatgaattaaatgccttatatagcagaacaaataccaagaattactattgttaattatcattattatttgcctgttcttagacaattgttacaaagaattgatcagtaaagtgtgattatgacacttgaatgcaatcaatggcttttctcagcattcctggtgtacgtttgaagccactgctctagcccaaatcttcatttgctctttcatgtcacctgaagacttgcgagaagcccaatttggaataggaggagcacaactttgcaccaaccatgcctctgataagtatggtctccttgctgccttatcttcttctgtctcattttttttttctcttgcaaaccagttagtatgctagctaaacttggacttaaggtttccttctcaaatgagaatcccaaatccttgaacccctgaacttcttcaaattcaaggtcacttaggcttctcctcattgttttctgattcaggtacttgcgcctcatctctataataccctctttgttgttgctttccacctcagtctttctggctggtctacatcttggaatgctacaagactgtcatgcatgaccaaaacataaatgacaaaatgtgaggactgagtagttaacttcaaaacattcaaatcaatctgaatttggaagtatatatgtcttaaaactgtactttctaaagggctattgacttttcttaaaaagtagtcttgtagcagcaagctatatatatgtgtgtgtgtgtctctgtgtgtgtatgctgcctgtccttttctaattatatgattttgcttagcaaaaaacttttggctttttggaccttttggctttaattagtgctattctgggtgctggccaaaataaaagcaatcataaactcttagaagggatagaatcttatgcatttaaaccataaatgaaaaatgagtctattaacttaaatatatttaacaaaagcagatgattgaagtaccttagaggtttgcctgggagccaaatgattggtgaagtagatatctagctaacgggtaatcaagtaggaaaccatgttacaaaagtttgatttgtcagttagattaggaatccttattatcaagaagattagtgcttatggcttaattggtatggcggctaaggtaacaaaaataaataaataaatgaatgcaccctaactcctaatttatatatgcgagattgcagatcgatgatcatacgcaagatttgatacacactcacgcacataagtcactaaacagttatgtttccttgaaattaaaagtatcagataacctatatattaacaatttgtgttttgcagctgtttgattttgcagataagtataggggttcttactcgggttcttgtccattctattgctcgtagtcaggtttccaggtaataaaagatactgctcctggaaaaatttaaacactaattaattaaacaattatttgcatagttcattaattcactaaggttgtgatttcgaattttatacaaaaaaggatgaactgttatgggctgcttcgttcattcattccaaatcctatccaatgccattggccggcctacctatcgtcccactttatttccacacccaatttctcctttaatttcatcacaaaaaaccgatgccttttattattattattatttcttgatttgatctaataatcaaacttataaaaacatggcctcacgtgaacttgtttaaatgaagtggacatttccaatgtgctgcttatgattttattcttttcattgatacttgctaaagcttggtataggactgtttgattgaccttgacacgcctaaagcaaattattttgttactgtgaagaagcaccatataaagtagtaatatatatagacaataagctagaagtgagaacaaagtgcaggcattatatatatttagacaataagcttattactaaaagagatggggatagggtactttaaagccagcatatatatcttcctaaatccctgtctgccaacagagattattctgctgctttaaattatttaatatttttagtcttttttttcttcctaaagcaaaccatagttaagacacttgatctcttgttttctttcagccttttttttctttcctctttttcaatttatttatttctagttcaatatgatattttgatctatttattgtaatagtctctagataccatttttaaatatttcaaatttagagtgcttctctttaattttatttaataatttgtcttaaaaatttattttgtttctgttcataaatcattttgcttcattctctctctgttctcttatttcaggatataaaaatagcaacttgccatgcaaacccactacgtattttaattcaattttaatatcttgtacaagggagcaactttagtggaattcttttgctgttccaatttattgtagtcatactctttttttttgttaaagttgttattgcactaattcaatttctattgcaggaattgattacttatctgttgcagcttatgatcactccattccatctcatctctattaaaagctacgagaaatctttgtttaaaattctaaattaataatgacagtttagaatttctggtatgttacgatcacatggggatgtaaagttgatgggcctgcatgtcactgtttaatagagccaacctaacaattaataggaacaaatggcaagaaaaaatttaataggaaccaaaagaaaatttccaaaatttacgtttaaactgcagctactttttttaagctttgattttatcttcaggctttgtatttttattgcttatcttttggaaatggtgcactgatgatgtaaactaaactatgtaaactatgtaaggtcactgccaccgaactaatgtacaccttgtaaaaataaggaattctaaatttcttagtccgctagtgctatatatattatgagaccttgtcagctttaagtatatatacattactacaaaaaaagttattctatgacactgcattaattatgattctagaaaatcatcatcataaaaacatggtgatatttttataaataatcgaaatttttcaaagatgattcttacaaaatcgtctttacaaaatcgtctttaaaacatctttgatagtttttgtcaaaaccgtccttgaaattagatactcaaaatagattatacaaaggagctgtggtgggccttcttttttcatttacacttgtgcccgttcctctcctctcatgtcacatacctaggtcgtgccccttcctcttgatgacggccaaggaatgaacgcttggatatgatcggttctgaatacaaatttcaatactcaagggatagttgtttagaacttaaaaataaaagatgcagaaaattaagaagatggcaatgaataacgctacgatccgtattgaaacaataagttaaggaggatttgcaacaacggaaagtttccttgataagaatcgatttaggttcaaccaagaaccaagaagaggctaagctctcaattcaagatttcttcttcttcaatcaaggacttcaaatttcagcttaaagcttattcgctgcctccagatgttgcggaataggttgttgtgggatttcatactcctttagtttccccagacttgtttagtctagttattgctattttcaccatggtgggtcgattcctagatcagagtgttgctgctctgatatcatgtaatttcataagtgttattttataataatactagtgtatttgaagtgtccatctacatctacatggaggtgttagctcaagtgtgcagaccaacaagaaaagaatttttcaattgacatctagtgatgtctagcttgacaagtaaatatatggatcttttattaatgccagctggaaccattattcagcctggcagtaattataattttgttacatatttattatattttctatcaatatttagttggttatatagatgtcattatccaactataaaatataaatggatagtacgtaactgatagaatattctaggctagactttagtataaaatctcatgtaatctcttttgtattcgtaaaagacttgaaggttacatgaactaataggtgaaggaaagtaacgtattttgtttagtttcttgtacaacttttttgtgacagagctagagatgaatttcaatagtactcctagcatttgagataccttgacctctccctagttccctggatatatatgaatccttaacaaattgatttcatatgctttttaatttttcttctcatgtaataactttacttaaaatgtaattacttacctagaagaataaagtatacaagtttaattatcttctagcttagtcctctggggacatgagttgctgaaattctttttatcttgatgcattttacatatcatgaatcatttgtgttatgattttatttatttatttattttcactctactcagatataccaatttcgaagactttggttttgaccttttaaaggcattagaactgggatacctgtctccaaaattatatgaactaacacaaatatttaaatcatttaggtaagttaagaactaaacctttttcaacagttgttttaaggaaattaactaaaatctttttgatgcagagaaagtaatgatgttcagtgcctcgcttttgttgaaagaattgtcacagcaaaacttattgacagatttgtaaagaaagttaagttcttggcgaaattgcaacatttatctgaagagtcacagcctggatgctccaccatgtcaccaagtgagttactttctctgtttgattcatatttctttcaagacaatctgttagcagctcactcaattaggatcaataataccgagttaaacttttgccactataaacatgatttgactatacccttagaaaatcctaattcagttacaaaatttgtattattgttttactgatgatgagttaaattttaggtgatggtgatatgcaagcaaacacccatgactgtgtacttgctgaattatttgatggtatgacacacatgactattgtgagttagtgggaccaacacatgtgtccaatttaaacttgcactacaaaaaataaaaccatttccgacagtttaaacttgagaaacaagtttaatctatttctattagaagtttgtctaggcctccaacataatgtataattaccttttaatgtcaacatagaaaagccaagttacttatgtaacttgcaggacaaagataccatagattggattatttaggggtgagtagctgacaaatagtttcctttggagtcatccttgtggcttgtgtttctcagtttcattttgtccttccataattattgtgcttttatttgaacccgtagataatgggagcttttgaaattatttctggtatttgaattcagctgcttttattgttgggcagtcaagtcaacgacattattgtgcagtggctattggagaggacgccgtgatttcagcatacacatacccatagtgcagtttcgtatttccttgattagagctagttaagtttgtaggttcctttctaaaaattatttatgtgcttacccctttttggaattttaatgaattttgcttaatttcagccagagattctagaaataaaacatactggactcacttctttttgtagcattttccatagacccctagcccttgttggggtttaattggccatgctagtaaagtttattaatactaaatttacttaagcttgaccattaaggttggttatgataattcaaagtgcatggtgcctgttatttgtttaatattatttatgtttatttatatggaccatagagttggcttaggagttaaattatagattgcatttgatgatgcaattgctaccaaagtataattcaaataaaattaaaaatgtctaaacttctaggattaatcctctttaaattaagactattagaatttggtttgtgtactagtgtataatgtacttgacgtattggcatttttaaatttttttaaaaagacattataagatggttctctaaaaaatcgtcttaaaaagtttacattctaagacgattttcagaaaaccgtcttagaatcctcaattttttattctgtatttttttaattacgttctaagacaatttgcatgtaaaaatcgtcttagaaagttatgcttctaagataatttttacttgaaaatcgtcttagaatgatgattatttaaagacgatttctcacgaaactgatgtcgaatctctcattctaagacggttaagaaaccgtcgtgaaaaatgttcactttccatgacgttggtttcaaagataattcaaaaatcattgttgaatgtctcaaagaaccgtcgtcaaagatgctttttctagtagtgagtgttaggcaaaaaaaatgtttttaaaaggtcatatgtgtagtaatgtactctaattaatgtacaaataagatgaaaaattataaacataaatctattttctcttctatttcactttcgtccgtgtacttcttagggaacggccaatagaggtgttaatctactgaaaatgaaagctccgacacctaataagagaaacccattggagcatgttcctatcaagcactcatgatgaatcaatatgcaaacaccaaatcttaaaacactattggaaactcgtgatttagggcctgtatgtttttcttctcagattttaaaactattttgaaagacaattttacagtatgtttaacactcaatttctaataacatattttttgttttgcaaatgattttttaaacaggtgttttaaaaatcaaggtgattttctatttttagttttgaaattattgaaaactaaatacaagagaaatgaagaaacaagatgtttcaattttttcttcctagttttctttaattactctattttaaagaacaaaatgaaagtgaaaaaatgaatgcatgaaatgagaagtgaatgcaaagacaataatgttgtaggtataaaaattatgtaaagtttgatcgtcatgctaatgctacaatattgttgctggagtttcgtcaagcattagtttgcttgacagtacacatagaagtgacttccaactttattcattcgtcaaaataaccactgtgttacatgtgatctttagtaatattttttacttaataaaaatgttgctataacactattacaaaaaaagacattaacattggttttaaaacagatgttgtatctaacgatgttgaaagtattttaaaatcatgtgaaaaacaaatctctacatcggctgtttccaaaaccgatgtaggaagtctgttcaaaatttgtgaatatgtcaattatcacatcaattgtgattttaacagatgtagaaaaacatttaaaaaaaaactataatttgactcaagacccatgtccaacatgcaaatataattgtctccaaatcaaattccaatcctaaattaatataaagagattagcatgtgaaagtataaagagattagcatataaaagaaaaggaaatgtaattttctatgactaaataaagcactaaagctcatctactaatcataattccaaccaaggaaaacaaaacatgagatgcacacacgtatgcataatcatagtaaaaattaatttataaagaatatataccacttcctataccaaaaaaatatactgcattagaaactggtcagttcttctcatcacattctcgcttgagcaatatgttagaatcaaatctgaccatgacaagttttcccaaaagttcctcccttggaaattctcttaggctttgtttgggagttaggaggggaagggaaggaaagagattcaaggggaaggggaggggaaggaaagggaggaaaatgagagaagttcttcctccttgtttgagagttaaaaatatattaaaagaggaaaatgaagagttaataagatacttttacaattttgcccttgaaatgtgattcagtgctttgtattttggtgttttattaatactgactggggtaggatagtaattttattaacattggttggggtaggatagtaattttattatttttccttctaaaaatccccaaattgggggaacaacaatttttaggctttggaggatttcagaggagttttaaaaatcctcaaatccttttcctcaaaaattaaaactcccaaacaaggagatatcaccacctaaacctttcccttctctcccgtcccctctaaaatctctctcccatacaaagccttaagagtttgtatatgaggaataccaataaactttccactattactaaagtaaatctaacaataaaaccataaaatttagagccaaaacaaaataaacaaccaatagcacctttcatgatagaatatgacaatcaagcttagcccacattgacaatctttgacattacatatattctaactggttatagtataagatatcaatatgattttatgtcattggcttttttattttcagaatttagacaaaaattacaaaactcataccatagaatgaaaggaaaaactcaagatccaaacaaccaaatgaaaattcaaaactcataccacataatgaaagtaaattttatcagggaccaaatgcaaattcaaaaactatttcaggcaccaaagacatatttaagacaataatataaaaacaagtgagactaatgaggaaagctgaaaaatagagtaagagagagaaaaaaaaaggaaagagaataataaggaaaaaggaagagaacaacttttccttgattgcatcccaagtccatcacaaaccactatatatgcaccaccatgccgccaaaagcaatttctaatggcctccctatctcttttctccttatctcctttacctactttctaattagtaagttggtgaatttttatagattattaatgcctttcttgttattttcttttggtttgattgcatattttaccatccaaatattaacatttttaatgaattttactgcccaagtttttttgttgcaaattttaacatcatatttttcaattttgtgcagtttaccattgtctattatcactagttgaccatcagttgtcgttagttggcttatgacatgacaatgttgactgttgatgctaatgttgcaatacacgttgcattgacatggtttgttaacgagatattgatgggttgacatgcagttaagggtagtttgaaatttttaaagtttgagcctaacttaaatatttatctattataggttaattttcaaggcctattatgccttgtttggaggccaagtaggccagactaaactagccttgaattttttaaataggtcaagtctatttaagcgaacaacttccgtatgtatttgattgcacttatgttgatccctagacgattccatctaaaatcggagcagatttccaacaaaaactttaaggtaacttttccttgtttcctcaatcatgactcaacattgtgcttctataaaaacatatcctagtgggtagtgtttgggtcttacttattgcttcataggtgattgtgtcatgttattgattgttgtgatgtaaatgtaaatggtgatctcttataccaaagcatggtacgatgaagtgcaaccttatcttgacactgatttttgggtggtagttatgggtgatggtggtttaagggtaaatagagttactaactaggttatttcttaaaaagggcagatcaagcccttaaacactacaaaaagaaaaagcggttttccgacggcatacttcccacggaagggattctgtcgaaatttttttgtgatacccacggaagagatcgacggaaggtattccatgggaaaaattggaaattccaaaggaattatacccacagacagttgttccgtcggaattattaaagaaatggaagatgaaatctgaaattcttactaatttgaactttgaaagaagaactgtttcctatttttggtgggaacaaactgtgactccttctcttcttctttcgcgatctcgaaaagcttgtcgtttatgcaggttcctcttttttcctctccctattcgtgctccttcttccccttctttcagatccgacgctgcaccctcttcctcttcctcctccctcaccaaaaacaacgacaccgattatgaatactacgctcacagaactctcatgaaggtggagtctcagtgtgaaggtaagcctaaggggatgtgtggtggcttcgacgctgctggtgcgtagcacggctagtgcgtcgacactgttggtgcgtggcacagcgacgccgctagtgtgctacgcgacgcggagacgctgctggatcgaggggtggcgatgctgcagggtcgaggtccaggggcggcgtcgagcggtgaaactgttgggaaagggtctcctcgaggtcaagggaggctgcgcgagtttgtcttctcttcaagaaagacaaattaggtgagtttgtcttgtcttctcttctcttcgagtttgtcttcatttgcacaaacttgtttttatgttgttacttggttcatttacttgcatactctgtattgtagtcatgttcctcttcctttttgggccagtagttgaaagtcatttgtaatattttatattgtgtaccttaatttgcatgtgcaggcttcattacagaaggactatggtatgaaattaggagaaatggtgtggatttatagcagaggaattgataaccagacttgattaggaaatatttatctaaaacccagacttgatttgtgtcaatttgttgtataatagcatataatgagtctgtgtgtgcacatgtatgtgtatgtacgcatgtgtctttccttccatttacactattccaatttgtagtatatgataatgtatgtgtgtttatgcatgtattgcttctaataaatcaaatgtgttgttgtatccctatttcctgataaacttgtttttaagatgacattatccacacttcctcaagaaagtaagtctgttggggctgatgtaaattggggtgtgagattcaaagatataaaagatgttagtattatcttggcaaaagaacccaaataatacatttttaataaaaaattaccaatttggggctgtttgcaaacaaattacacatttgggacagtgggtcacgcccagaatgggcatgatcagtcacgcccagattaggcatgaccagggggttcatgcccagattaggcatgttccaccacagggtgacacatgtcatggtggcacgtgtcatgcacagatggagcgatgtgtatataaacttcaaacgatcataacttttgattggaatgtccgattgaggcgtacgatatttgcccaggccttcttctctcaattacgatcgttttgacatatcgtacgcctcaatcggacattccagtcaaaagttatgaccgttcgaaatttatatacacatcgctccatctgtgcatgacatgtgtcaccctttggtggaacacagctaatctgggcgtgacccccccctggtcatgcctaatctgggtgtgactggtcatgcccattctgggcgtgacccaatgtgtaatttgtttgcaaacagctccaaattggtaaatttttattaaaaatgtattatttggattcttttgccgtattatcttacattctgtaccttacaatcgtataaaatggaaactatctgtgtgcgtaaggattgagataattactatttttgttattttggggatacttgaaaaatggaaactacctgtgtgtaactgtggagataattgtcacattgtgtgtaacagtggagataattgtcacatataatgctctgtttctttagaaagctattaatgtgcctcctctaaatttaagcttttaggattcaatactttcttgttccattcttcataattaaattaaaatttgattaaaaggtatagttgactagttcttcatccatggttgaagttcaaattgctagattttcatgagaggttgtggtagagatataaacccgttttttttatctccacttctcagcttaatcttttagatgattggttatttacaagtttgattttgtgaaacctcatatagttgttaaattgctcttggtaaattttagtaatgaaatagcccaaaactaaagaaaactgtcatgttaaatatgactatagtactatagtatggtggctggaaagtcatgcaattttaggtgcattgctaatgatagaccagatttggtgttggccttggcccgtgagtttatactgaaagtttcagtagacagttaggcgaagggcttcaggttgcatattatgtattatattctaaaataataaatgcttgcatggtcaagctgcttagtgcttatgcctttggacttcatatttcaattttatgatggtattttcttccttaacatgttatttagtgtttcagccttgacttgtagcagggtatccatatatgtttaatacatatttaattggatatgttaacatcttcatcttctccttctgttgatttcacatagatgtcaaggagattcgaggtattggcttgcatgtttccaagcttgaaagtgcataagcttctaaacaaggtatttatgttattcacagctaaggttaaccatctgggctataataatatataactttactgcttttccttggttttaaacttttcttttcttattttaaatcatttctctatggttgtctaacattttcatttagagattaaaaatcaaattttaaaaaaatttaggaaccttgatcaattaaagctatataggagatattattattattattattattattattattattattattattattattattattattattattattattgttattaggataattatgttcatttaaatcctcaaaatcatttttttaatacgaaccttcattttttttttggtgaatggaatacgaacctacttgataccattgatacattatctttattatttgtcttatagtgttaacaaagtcataactactgaaaccaggcaaaaaaaccaataaaatacaaaaaaaataaaaaattaccaatatggggcaacaggcaaactatttacaaatatggggcaactggtcacgcccagaactgggcatgactggtcacgcccagaaccaggcgnnnnnnnnnnnnnnnnnnnnnnnnnnnnnnnnnnnnnnnnnnnnnnnnnnnnnnnnnnnnnnnnnnnnnnnnnnnnnnnnnnnnnnnnnnnnnnnnnnnnnnnnnnnnnnnnnnnnnnnnnnnnnnnnnnnnnnnnnnnnnnnnnnnnnnnnnnnnnnnnnnnnnnnnnnnnnnnnnnnnnnnnnnnnnnnnnnnnnnnnnnnnnnnnnnnnnnnnnnnnnnnnnnnnnnnnnnnnnnnnnnnnnnnnnnnnnnnnnnnnnnnnnnnnnnnnnnnnnnnnnnnnnnnnnnnnnnnnnnnnnnnnnnnnnnnnnnnnnnnnnnnnnnnnnnnnnnnnnnnnnnnnnnnnnnnnnnnnnnnnnnnnnnnnnnnnnnnnnnnnnnnnnnnnnnnnnnnnnnnnnnnnnnnnnnnnnnnnnnnnnnnnnnnnnnnnnnnnnnnnnnnnnnnnnnnnnnnnnnnnnnnnnnnnnnnnnnnnnnnnnnnnnnnnnnnnnnnnnnnnnnnnnnnnnnnnnnnnnnnnnnnnnnnnnnnnnnnnnnnnnnnnnnnnnnnnnnnnnnnnnnnnnnnnnnnnnnnnnnnnnnnnnnnnnnnnnnnnnnnnnnnnnnnnnnnnnnnnnnnnnnnnnnnnnnnnnnnnnnnnnnnnnnnnnnnnnnnnnnnnnnnnnnnnnnnnnnnnnnnnnnnnnnnnnnnnnnnnnnnnnnnnnnnnnnnnnnnnnnnnnnnnnnnnnnnnnnnnnnnnnnnnnnnnnnnnnnnnnnnnnnnnnnnnnnnnnnnnnnnnnnnnnnnnnnnnnnnnnnnnnnnnnnnnnnnnnnnnnnnnnnnnnnnnnnnnnnnnnnnnnnnnnnnnnnnnnnnnnnnnnnnnnnnnnnnnnnnnnnnnnnnnnnnnnnnnnnnnnnnnnnnnnnnnnnnnnnnnnnnnnnnnnnnnnnnnnnnnnnnnnnnnnnnnnnnnnnnnnnnnnnnnnnnnnnnnnnnnnnnnnnnnnnnnnnnnnnnnnnnnnnnnnnnnnnnnnnnnnnnnnnnnnnnnnnnnnnnnnnnnnnnnnnnnnnnnnnnnnnnnnnnnnnnnnnnnnnnnnnnnnnnnnnnnnnnnnnnnnnnnnnnnnnnnnnnnnnnnnnnnnnnnnnnnnnnnnnnnnnnnnnnnnnnnnnnnnnnnnnnnnnnnnnnnnnnnnnnnnnnnnnnnnnnnnnnnnnnnnnnnnnnnnnnnnnnnnnnnnnnnnnnnnnnnnnnnnnnnnnnnnnnnnnnnnnnnnnnnnnnnnnnnnnnnnnnnnnnnnnnnnnnnnnnnnnnnnnnnnnnnnnnnnnnnnnnnnnnnnnnnnnnnnnnnnnnnnnnnnnnnnnnnnnnnnnnnnnnnnnnnnnnnnnnnnnnnnnnnnnnnnnnnnnnnnnnnnnnnnnnnnnnnnnnnnnnnnnnnnnnnnnnnnnnnnnnnnnnnnnnnnnnnnnnnnnnnnnnnnnnnnnnnnnnnnnnnnnnnnnnnnnnnnnnnnnnnnnnnnnnnnnnnnnnnnnnnnnnnnnnnnnnnnnnnnnnnnnnnnnnnnnnnnnnnnnnnnnnnnnnnnnnnnnnnnnnnnnnnnnnnnnnnnnnnnnnnnnnnnnnnnnnnnnnnnnnnnnnnnnnnnnnnnnnnnnnnnnnnnnnnnnnnnnnnnnnnnnnnnnnnnnnnnnnnnnnnnnnnnnnnnnnnnnnnnnnnnnnnnnnnnnnnnnnnnnnnnnnnnnnnnnnnnnnnnnnnnnnnnnnnnnnnnnnnnnnnnnnnnnnnnnnnnnnnnnnnnnnnnnnnnnnnnnnnnnnnnnnnnnnnnnnnnnnnnnnnnnnnnnnnnnnnnnnnnnnnnnnnnnnnnnnnnnnnnnnnnnnnnnnnnnnnnnnnnnnnnnnnnnnnnnnnnnnnnnnnnnnnnnnnnnnnnnnnnnnnnnnnnnnnnnnnnnnnnnnnnnnnnnnnnnnnnnnnnnnnnnnnnnnnnnnnnnnnnnnnnnnnnnnnnnnnnnnnnnnnnnnnnnnnnnnnnnnnnnnnnnnnnnnnnnnnnnnnnnnnnnnnnnnnnnnnnnnnnnnnnnnnnnnnnnnnnnnnnnnnnnnnnnnnnnnnnnnnnnnnnnnnnnnnnnnnnnnnnnnnnnnnnnnnnnnnnnnnnnnnnnnnnnnnnnnnnnnnnnnnnnnnnnnnnnnnnnnnnnnnnnnnnnnnnnnnnnnnnnnnnnnnnnnnnnnnnnnnnnnnnnnnnnnnnnnnnnnnnnnnnnnnnnnnnnnnnnnnnnnnnnnnnnnnnnnnnnnnnnnnnnnnnnnnnnnnnnnnnnnnnnnnnnnnnnnnnnnnnnnnnnnnnnnnnnnnnnnnnnnnnnnnnnnnnnnnnnnnnnnnnnnnnnnnnnnnnnnnnnnnnnnnnnnnnnnnnnnnnnnnnnnnnnnnnaccgtccgaagtttatatacgcatcggttcatatgtgcatgacacgtggcagaagtgggtcatgcccagttctgggcgtgaccagttgccccatatttgtaaatagtttgcctgttgccccatattggtaattttttattttttttgtattttattggtttttttgccactgaaaccattatagaaaggtttttaaaataataataataataataataataataataataataataataataataaaagataaatccatcaataaaatcatgttttttatttgctaaaagatagactgttatttaattcacacaaaaaatatgtttcttatagagatagatcatatctttatttacttagagatataggtcactttctttagttgaaaaaaaaatattgccttccttttttattttatttttatttttccctatttactataaatctatctatgagattttgaagtaggggtgttcacgggtacgggtcacccatgatccgaatcgatccaaactgatctgaacagtttgggttgggtcatttatatatttgggtcaaaatcgaaccgaaccgatcaaaatcattcatgtacgggtttagatttacagatccgttgatctgatgactcgatctgtgaacccgtaataataatataaattttattatatatatatattaaaaattaaaaaataatttgatagtaaaaaaggtataacattgtaaatatttaagattgcattcaaaaataagataggatatttgaagtgaagagttaccctgaacttgtccgttgttgatttcaaagagttgaactgcacatactacataaatagtgttgggctattctacttagatcaagcaataagagaaaaagctaatgatgtcttgtgttatattagtttatagatcttaatgaattgagactttatgagtggtttaatatttaattgttatcttaatgtttgtgtgaaagagaaatggtttcttctgtgtctgattcagtctattacaagacacagagttgatatactgtgattattttttgcaatgatttctaacggaatgcataagctcgtctctaatgtcctatacgagtattttcgacggaaaaatccgtcgaaaattttccacggatcattatcgatggacgaaaaaaattctgtggattgaaatttccgacgatcattttaccgacggattttaatctatcggaaattccaatttaccgacagattttttaagttttcgaccgatttcgttcggaaatgtgttttttttttttttttttttnnnnnnnnnnnnnnnnnnnnatgtcatattaaatttttggcttaaattattttttattgtctttgaaatattttcaatttttttttatcttttggttcttaataaattttttcttgccatttaatccttggaaacttttattttatatttaatccctaacattgcattggttttgttacagtgacatgtccattaacttgacatgtcaccatatgtgatcgtaaagataccaacgattctaaactatcattagtaaccgccaattttaaacaacgctttttgttagttttaaacgtttataatcaattaaagannnnnnnnnnnnnnnnnnnnnnnnnnnnnnnnnnnnnnnnnnnnnnnnnnnnnnnnnnnnnnnnnnnnnnnnnnnnnnnnnnnnnnnnnnnnnnnnnnnnnnnnnnnnnnnnnnnnnnnnnnnnnnnnnnnnnnnnnnnnnnnnnnnnnnnnnnnnnnnnnnnnnnnnnnnnnnnnnnnnnnnnnnnnnnnnnnnnnnnnnnnnnnnnnnnnnnnnnnnnnnnnnnnnnnnnnnnnnnnnnnnnnnnnnnnnnnnnnnnnnnnnnnnnnnnnnnnnnnnnnnnnnnnnnnnnnnnnnnnnnnnnnnnnnnnnnnnnnnnnnnnnnnnnnnnnnnnnnnnnnnnnnnnnnnnnnnnnnnnnnnnnnnnnnnnnnnnnnnnnnnnnnnnnnnnnnnnnnnnnnnnnnnnnnnnnnnnnnnnnnnnnnnnnnnnnnnnnnnnnnnnnnnnnnnnnnnnnnnnnnnnnnnnnnnnnnnnnnnnnnnnnnnnnnnnnnnnnnnnnnnnnnnnnnnnnnnnnnnnnnnnnnnnnnnnnnnnnnnnnnnnnnnnnnnnnnnnnnnnnnnnnnnnnnnnnnnnnnnnnnnnnnnnnnnnnnnnnnnnnnnnnnnnnnnnnnnnnnnnnnnnnnnnnnnnnnnnnnnnnnnnnnnnnnnnnnnnnnnnnnnnnnnnnnnnnnnnnnnnnnnnnnnnnnnnnnnnnnnnnnnnnnnnnnnnnnnnnnnnnnnnnnnnnnnnnnnnnnnnnnnnnnnnnnnnnnnnnnnnnnnnnnnnnnnnnnnnnnnnnnnnnnnnnnnnnnnnnnnnnnnnnnnnnnnnnnnnnnnnnnnnnnnnnnnnnnnnnnnnnnnnnnnnnnnnnnnnnnnnnnnnnnnnnnnnnnnnnnnnnnnnnnnnnnnnnnnnnnnnnnnnnnnnnnnnnnnnnnnnnnnnnnnnnnnnnnnnnnnnnnnnnnnnnnnnnnnnnnnnnnnnnnnnnnnnnnnnnnnnnnnnnnnnnnnnnnnnnnnnnnnnnnnnnnnnnnnnnnnnnnnnnnnnnnnnnnnnnnnnnnnnnnnnnnnnnnnnnnnnnnnnnnnnnnnnnnnnnnnnnnnnnnnnnnnnnnnnnnnnnnnnnnnnnnnnnnnnnnnnnnnnnnnnnnnnnnnnnnnnnnnnnnnnnnnnnnnnnnnnnnnnnnnnnnnnnnnnnnnnnnnnnnnnnnnnnnnnnnnnnnnnnnnnnnnnnnnnnnnnnnnnnnnnnnnnnnnnnnnnnnnnnnnnnnnnnnnnnnnnnnnnnnnnnnnnnnnnnnnnnnnnnnnnnnnnnnnnnnnnnnnnnnnnnnnnnnnnnnnnnnnnnnnnnnnnnnnnnnnnnnnnnnnnnnnnnnnnnnnnnnnnnnnnnnnnnnnnnnnnnnnnnnnnnnnnnnnnnnnnnnnnnnnnnnnnnnnnnnnnnnnnnnnnnnnnnnnnnnnnnnnnnnnnnnnnnnnnnnnnnnnnnnnnnnnnnnnnnnnnnnnnnnnnnnnnnnnnnnnnnnnnnnnnnnnnnnnnnnnnnnnnnnnnnnnnnnnnnnnnnnnnnnnnnnnnnnnnnnnnnnnnnnnnnnnnnnnnnnnnnnnnnnnnnnnnnnnatttttgttttcataataattaaaaattatataaatctaataattaatactaattgtttttataatgatactaattattgttatcccttccgataatcaaataattttacttaaataattttcccctctctagcaacatggataggaaaatggtaggaaccagcagttgattaatttctttttttacaagagcggatgattaaattattggcttaaatatttatctaaaaaaaaatattattggcttaaatatatatttttagttgttttgtacggggtgagtgaaataaggaataaaaaatttgtaatatgaggtaatttttcactatcataatttaatttttacattaaattttaaaaactgacaaaatcaagttaataaaaaacttaaaaagcagtatttaaaataaacaatttatgtttttttgtaatatttttaccaattaaaaagaaattatgaatttcaaagactaaagaaagaactacaatgaaattaactcaaatttaaaaaactaaaaatatatttaaatttaaattatcaaacatttagaaaagatattaaaaataagtagtcatgggacacacatggcatggttgtggagaggaaggtggaaaccaaaatgactagtattgttttaattattattttttgatgcaatcgccccttctcgattcatttgcaatccacacgcctctgcctctttcctcctcctccattatctcaccaaaaccagcgcagtgatggcagcagcaacagcaacgaacctaaccctatggggaatcctctgcgaatcaaaacgcataatcaacgcccactctcgccacttcctggccctctccgtcatcttcctcctccctctctccttctccctcatcgtctcccctttcctcttccctctcttatcccctcaccactcctcccacatccacatcctcctccgccaaaccctaaccctaaccctaaccacttctctctccttctccctccccatccccctcctcctcttcttcctcttcgtattcttcttctccttattcgccctcgcctccatcacccacagcgtcttccacggcttcttcggccgccccgtaaaactcctctccgcgttcctctccgtcgccacctccttccttcccctcctcgccacctccttcatcaccagtctcatttttttctctctctcactccccaccatcttcctcttttccacctcctcctcctcctcgatcctcgtcgccatctccgccgtcctcgtcctcctcgccgtcgtctacctccgggtctcctggtccctcgcctccgtcgtcgccgtcaccgaatccacctgcggcggcctccaccccctccgtcgcagcgccgccctcacaaaaggaatgaaacccctcgccgcctcctgcttgctcttcttcggctccctgcaggccatcctcctctggaccgcctccgccctcgtcgtgggctccgacggctgggcctggaaagactgggccttcgtcgtccagatcgtcctcacctccacgctcctcgtgctcctcatgctctacaacgccgccgcggacaccgtcctctacatgtactgcaaggccgtccacggcgagctcgcgctcgagatcgccgaggaattcgcgtggcagtacgtttgcttgccgttcgacgacggcaaggttcctcacgttgtttccattgtccgtgtttagtgtagcttgttttggacacctttgtttttatgtaacaaagcgcgcgtaagtgtaatccatcccaaacttttaggtaagggggtttagtctagctcttggttgagaagtgttgagaattgtccatgaattattgtaaaatttctaagaccgactttgattctcacgcgtaaaaaaaaaactcaagcttttagtcgtgtaaatttgttgattaattaataatgaactgttacattgttaattggagtgtggaacttgtacatgccaaatatgtatatttgtggtggttttcgttgctttttatttttcagttgaagcttgaaattgatggcgattattattaggttacaaattttgggtgaatggtctgttttgagatggatgttagaatgattgattggatggctttgttttaagaattggtgtttcgattttactggaatgtgaggaaaattagctaatggttctgctgagttaaaaaattgtgatttctgcttaaggtctggactagtagtattaaaatcagggaaagttatgattggaacttgcttttatttatttatttatttatttaattggagtcgatcagaatgagaaatgtaactgaagtattagaactagaaacgtggaattagctaatggttctgctgagttaacaaattttgatttctgcttaaggtctggacattaaaatcaggggaagttatgattggatctttttctttgatttgattgtagttgatcacaatgcgaaatgtaacagaaggtttatagctagaagcgtggaactgttgttaccttggccaaattgtgcacatggtattggtgttggagacttggtagtgagtatatctgaaaataatgtaactgcatactaggtgggatattggaaaatttcttgcacaaagtagcaaaataatgagttttctcctttgattttgaggatttgaatttgatttcacggatattatcaatttcttttatgttgaaacttgtggggcactttaaaatagtggagtggtttgctaagagtctgaaaagtggaaatcaagttaagtatattcctctattgtagtgatagtcttatagatctttgttgttattgattatagataatggaatcagtggcaaatcttaaaggtctggacgctaagtattaaaatcaggagaagttatgattggaatttttgttgtttttattggagttgttgatcagaatagaaatgtagcagaaggtttataactagaaaggtagtattggaaggggtgcaattggttaatttgtagtcatatagtttatctataagtgaaaatgaattttctattaattaatttgtagtcatataatttttttaaaagatgaaaaaatatttataaattagttaataattaagtaataaataatttattttatcttatggaatatgaagacattcattttcttttctttttattttctactcttaaaaatatttttagagaaatttaccaaacagtcatatatttatcatttgtgatgcttatgggaatttcttccccaaactagtgaggttgtagtcttttttctctgggccctccccattaacaaaaaagaactagaaaagtggaactgttttcaccttggccaagttgccccaaggtcttggcgttggagacttggaagttaataacttaagaacaaaacaactcaagtgcttgcaggcacctccttgttatgcgaatgtattatgaaggattactgtatatcgtcttaacctttcataagcaaataaattatttctatattcaaacttaccaaccgatcatcaagacatataattttattgatatgtcagggtttttccttgaaatttagtgactaatagtggtggcatattgagaaatgtttcatgcacaacaaaagtagcaaaatgagttttctcctttaatttttgttgggtttatttattagatgcgtgaatatgaaaatgatgagcgaggaagataaaaaaaaagtgagataaaagataattgtaattgatttcacggatattatcaatttctatatattgaaactagcacggatagacagttactgttgtggttgtttatactggtttttaattctttgaaattagatttgttacgtgcgtagttggtaccattttttttaatcnnnnnnnnnngcgaggaagataaaaaaaaaaaaaaagtgagataaagataattgtaattgatttcacggatattatcaatttctatatgttgaaactagcacggatagacagatactgttgtggttgtttatattggtttttaattctttgaaattagatttgttacgtgcgtagttggtaccattttttttaatcattgttatgggaagttgaaatcaaataatggagtggtttgtgtctctgatgagaattaaagatttaaaaaatctgagaaaaggagagatcagataatgagatcttctttatcattcctatactagattataggtaatgaaaccagtgatagattttttctttattctcaaacaagtgacagattcttttggaaagaggctcttttaagcttgcttgttgcttaaatgtacaaaaagatttccctcgacttaatttatataagcatgatcttaattctgaatatgcttttacatgtgtagcttataggcaagctcactttagaagagtttttttttttttcctttcttttaccgcattattttttgtacaaattgattctaaacttctataatttctatgtaacttttgctctttgcttctcttgataaaaaaatcaaccttttatcatagctgaaaattcaacctttgcttctcttgatgttataatattatttaatgatataaatatatagttctcttccaaaatcagccacgtatccaaaaatggataaaacttgacaaactcaccacacttgtggccccacttagtatcatgcgggaacttaaacaacagcaaactatactatttgggctcactcaatgtcaaaggatctcataaactccatggaacacgtcatttaccaatccaacccctttgacaagtttagaggagtgttcaggtcgtatctggagatccaaacgatttgcttctccgaaaatcagtaaaaccgaactcaacctgtttgtggttgtgggataaagacataaacatcagtgcatttcgtgacctgacaacagtttggtggaacaatgatgggcatcgaagaatattgatggtttgtagagggaaacgtattggaattatatgtacaggaacaaggaaattggtcatatcctatacatataagtcatccctctacacttccttctactacccccaatattctctggtatatgtcattgttccaacaactgttgagtcacaaaatgcagtatcatttatgcttttgtcagcaagcacaagctgttgagtttgtcagttttatccaattttagagaagtctgtcgtttggatcttcaggtacgacctacctgaacaaaccaaacttgtcaaagggcttggatgcataaagggcatgttcaatgacctaacagtatttgttgttgtttaagttcccacatgatatacatgctcgagcctacctccaaagcccaaaatttgcaagcatcatcttaaattgttcaagtacctctagctcacaagtcaaagaatgaacaattcccatgaaatagtcagaaagatagttatctaattgacacccaagtcaagcttttcaaaatctactatctatgaccaacactggaagacgaaagagacattttaaaagccctgtcatcctgatcagctctgaaaagaagattagtccaatttgtagatctctgaacaatcctacttgggtcaacccggtcactgtcttctccaccagaagcctcatatccatcactagttgaacttgacagtggaatttccttcagtgttgcagcaccagcagctgaaggacctgcaagctgtcttgccttttcagcacctgatgaagacaccccaaaagggtggatatcaggagagtctaaactactttcaggagatgaaggaacaatcccagccgagcttgacattgcttgacttgtttgaaatgtgctgcgcgtttcaaatgggagaggagccaacctagacatcccactcaaggctttatcagtattactagaagaaacttttgtcagggactcgatagacaagttggcgggataatgaacccgcttactagctcgtttcttattgccttcaatcctgggaaccattctttggtcactgctaccaaaactgctttctggttctaacctgatagcctcaccatgtcttgttacaggctgcagaactttggatttttttcttgcttctgcagcagccttagaaatttcttctgcatttaagcgtgccaatgtccaaggactaattttgacagttccaggattctttttctttaatggatcttctctcattgtcttctttcccagtgaacttacagaacctgtttctgggggcacaacatcaaactgcaaggacaacaccccaaatgcccccaaaaggagatggaaaaaatgaaacaggtggagcttgataagtaaacgaaagaaagaacataaaaaataaaatagtacttgcaatctagaaaaaactaaatgacatagcagaatagcattcatttaaaaggagtaaagtaaaatgacctagcatgatatacacactgctaaaaaccatccagcaaagctacaataatttccaaagttgataaatgacactatgcttgctatgtttattcagttaattgtacataacatgttttttattgcataataagttttctttcctctccacaataatcacaaacaaatcaattacatcgtgttctttttgtaacttctttagtcatcgcgatctttctgtttttctcagcagcataaaaaactaaaaaaaaaaaactacgcaccccattacccggaggctccacgctatgcgcaggtaagggagagggatattgtatgcagccttacccttttgcatatgcaaagaggctgtttctgggattcgaacccatgaccaacaagtcaccaagacacaacttttctcagcagcatgcttcgataaaataaaagatgtgtattcagatgcaataatgcaagaagttcaaatcaacaccattcacttttgcaggaaaggcacaatacctacaggtattttaagcagacaaaaatccaaacataaaatacaaaaacagaacattaatatataaagcaagtttaaattgaaaatatgttacctgatcttcaagcagcaggcgtgggggtgtgcaccatgcacctcggtgtaaagtagtaaaggagcttgcactactcaatccagtaaatgagctaacagttgacatttggggactttgctgacctccatttcctagctgctcctgctcttgctccctcattgctatgatgtaatcgtatgtgctgagtccctgagtgaatcagcaataactataacaattaacacgcatgattgtagctagataatataataatataatgtagtaatatttagcactaaaaatgtcattgtcatcaactgagaattaatacataaacttgcattttgccccaaggaagacgttttattgcctactaggagctaaaaggtgagagacttgtcaatcttgtctatacaaggtgtgtagactacctatgtagcaccgataccgatacgacgttttcgatacggaacttcgatacgttcttcaaaaattctaatatttcgatacgtttccgatacgtcttagtattaaataatatttttttttatatagagtgtatttcatattaataaaatataataaaaggaaaatcataaacacaactaatagaaaatgtgtagaaaatgatataactaaaatgagaatagaaaatggtaatagaaactgaataatggtaatagaaaatgatataaataaaatgaaatataaaatgggttgaaatagaaaatttggcactatctaaaaataaatggcactacttaaaatttgatactaatttaattttttaatgtttttaaaaatttgaattgaagtgtaaaagcacagccagcactctagcagtcacctcacctcacgcctcacgctcctctctctccctccaggctcctgttttgctgtcccgatctccctgactccctccatggctccactctcttctccggctccctcacctctccagcagccagccgcaccggcgccggtctccctccactctcctctccctcacggcctcacctcacggctcacggtcacgggttagtgactcagtcgtcacgcgtcagcccgtgcccgtctgtcacggcctctctgatacggtgtgcgacggcacgcgagcagggggtgcgcggcggcgtgcgacgggaagcgagcggcaatgaatcggccaagaccctttgacaatttttgaccattggatacgcgaatttacgtatcggccacgaatccatatcggatgtgtgtctgatacggtgatttttttttttttttgcacgtatccgtgctacatagtagactactaaaccatcaacaactaacgcattattggtgtaaatgtaagaaatgtgacaggaattatgtaattatttagtgcttattttttgttaggaaagagcctaacaaacgtttggccaaactgaaaaaaaaataaaatgcatgcatcaacattttctcccttggaatgtgggcaatggcttctgaacaggtaactaaacatagccttaatgtaatgtaaaatgatgatgtgtcaattgttaattggttcagtttattctacacaacttgcataacattgtctaaaataagaacttctcttaaagggtacatacgcaaccatcaaaatacatccaactacccatcatgtatattccttttgctttcttttttttttttctacatgaagactaaaatcatttattcttgaatagaagctggcctgtatgaataacaatttaagatgttccttaaaatgaaaagaagtgttaagcagataatcaacataccaaacaacagtcaaccttacctttttaatgaggaggatatgaaagaagaaaagctgaacaactggtaaggtagcaatcatagccagaatggtgcagatagactgaaaattttcacatgtgaatataagaatagctgcatccggaaatagcctcaatggttttcatcaaacaaaaaagagcaaaaataagttgatttttcagaacaataaaaaagtagccattattaagcaaatatagtaatcacataatatgcacacatgaataagaagcaggggaagcagaatgctcaccaccacaagaacaaagggaaccatagagaaactggttcccaacttggaggagatatccacagaaaattgcttcctcttgacaaaacagcagataagcacaagtatcccagtcaaccattgaagaataaactgcaatctcaaaggcgaaaaaatcatttatggacctgtcattagttagtcataatgaaaataacttggaaaaaaatcatacttgtgatgctctataagatatggcatgttgcaacaattactgagacaggtttgggacggtttaaagagttgacactttatagggagacaagtagtatcagaaaaagatgaaagagtttttctggcaatagagggtgatttccaaatgctggtgatatggagagaatcatatttttcaattcttacatagtacttactaactatagttacagtaggttcatccatgtgaatgagcacgtcataggtggaaaatattgcttaccaagagcatagcagcaaccatgagggtgaaaaattgccgatagttcttttttcctatacagttgttaagccactgcaaaacccaggaagcaaaaggtcttcagaacataggtcaagtgaaaagcaaaggaataagaagatatatactcaattactcatactcgacaatgatggtcaaagtgatctacacacttgtcgcagactctacagtgcttgctgtacttgaaaacctacaacattaacaatattattcagtgataaaaacttattttaccatacaagcattgcagagtaaacatgagtttgtaacagtaggtaattgtgaagttctgcatgcaatgatgctgaggcaaaattatctgtccacctccacatgtcttattaaggaatgaactcaaacagtaatttcaaagggacaatacatttctagttcaaaaacttttacacacctcgacttcacacagactgcaatagaacatgccatcttcacttgtttgtttatcagaagatttctcggttgaactagagcagctgcagatatatgcacaaggagaagaaaccaagaggacacaggatgaacaagatgacaatgtactcttctctactgaatttgaagcatctttcgaagttccttttgttcccaatgcctctttatccacagatttagctccaactattgaagcatttgcttcatgcattgatgaagttgattcttcacctaatttagaattctttagttcagcaagctttttactgtctgggactttaagatacttttgggacttaaaaacccctggatctcctggatctgctgcagcacaccatatgtacagtccaaagacactaataatctggcaaaataggaaatatcactaaacaatgtctttcacaggaaaataacagtcctagccttaggggagtcataattggaagggtggtcaaaatagctaacagaaggggaaaaaatatcaaaagatataaggtgcatatcagtatatcactacattaaaaacaaatcccaaacgcacaatacagcacctgaacaaaaatctacagtactttccaagcaaacatctacgggtaagtttgtcacacttatcctccttaataacatttatagaatacaaaattcacaactccaacctatgaattatttgatatcatcttgatgatcatgcatatcagatttaaagatcaactggacataggcgtgtgacttcataatcaataattacttatattttgaaaacataccaacgatacaataaaattgattgatgaaatatcaaagaaattttaaattaaatgaaaattttaaattggcttgaatttcatattcctaacatataatttgtgcccgaggcacaaacaaatagatccaccaatatagttctaagaaaagaggaaaatttcaaacaagtggtaattaatgatcaaaagaatttaaacagaaaaaatgaaatctttgaaattgtagttcacacatgtctcgtgatagctatgtgtcaaaagttcttaaaatggatgtaagaattggaagagggaaagagactaaagaggtcacacaagcaaccaaaaggacattatcagatacagagacagctccatagaacccttcattgaactacacaacaatccaaacagaatggtacattatacaatgaaaattgagaaggaatcatgaactggaaacaaaattcagagtcacaaaaaaaaatcaaacacatgaatctgaaggcaaaaaaaagaagaagaaagaaatcaaagaacacagtccttccacaaaccaatttagaaagcagaaaatgagtatattataaacgaaaaatatagaaagccgagaaatttgaagatgggttaccagtggtgagtaaaggccaataacaacgtactgatacatctttccaacaaaaggagcaaagaacacatagaaggcaaacccaagagccagaaacacagcaacagccaccaccttcacaaagattttccaaaatgaataaacaaaacaacaacaaaataaaaaacaaaaaacaaaaacttgtgcacaaaaaagcaccaaaatttgcgactacctgaagaggatggtaaggtaattgccacccatgtttcctcatactttttgactttgaagttgaattcaagaccttttaagtagtacacagcaccaaaaagcacaacaagagcatagaacacagagaactagacagaacaacctgggacagttacttttgttttattttttcccaacattttcacctctttatgttttatttattttaagtaatgcaaaatcagagatttttagtcaaggacaaagaaaaaagggaagtggccaacggccatgacatgttggttgaagcagagagagagagagagagagagagagagagagagattaggatagtggtggtgggtgtaaacactgaaggaatgctttggtctttgtctgctttcaaagaatgttaaagtgaaaaagaagggaagtggtaaaggtatggtcttttttggattttggtgtgtgacttctttgttggttggttgcagaaaaagcttttttttacttcttcatcagagatctgtgaccatggctttctcatccatgccccataataattaccacacacacacataccctttttactttaatttttattttttattttcgagtttttgggttctctcaatctctctctctgtatatatatgaatatatcttctgccacctgctactcactgctgtgagcgggttacctttttgaattggcaaatcatgtgtcacagcacactgcaacctttgcttctgcttttgtaacaaactttgtcttaaagccaatctctctctctctcttaactttaaacttatttgatgatcagtcttaactttaaactttaatctttaataataataataataatatgattaattttttatgcataaaaataaaaaataattccaaaaggtttacaaaacttagtttaatcaattgagctatatcacttttggtgactaactaatatctttaaaatattaattaaaaatttaaaagaaaaaattattgtaaaatcatataatagtataaaagattataaataatataattttgcatatttaataaaaatatttcttcccttgattacttaatcaataatccgacagaatttggttagcatttgcccgataagaatcttgtgtgtaaaataatgatactaaatcttactgtattagcatttgcatgtatttggaaaagatagccaaattcagcgggaaattagcaacccgctcaaatttaatgttcacattttaaaataacatgtcgtattggtttattaattatgaagaatcgacaaatttaatgcaaacaacaaacatgcgttacgtgtctagagaagcatccaactccaagcatggcaaatccggattatgtaatagcattgtcttttaagattttgaaaactaattaatgttttaattacaccttttatttatttcaatataaagattaatcagcataaaaaatatagagattaatctcaacaagtacaaatatttctttaagaaattaaattttcgcaacaaatgtttatctcaaaacaacagccagaaatctattaaagaggactgatttttttcttcctttttaattgtttaaatatctaataaatagtaatgtttaaaaaatatgttctacttctatacagaaattttgaaactaattttcatttaaaataataatatttattgttattagcaaatataactagttttacacaattttacactaattattatcctaatcattatactaataacaataaacataactaatttagattaattaaacttaagtattattaatttattataacagaaacataaaaattaattttgcactaattaacttgcatatataagaagatccaacgaagagaggagctagactgctagagtctctacatgccccagggacgttggcaaactaagaagccagcagggtcaactacaaaaactaaatcaaacaaatacataaacattaagttccatataaaataattataattatgtgttttttaaaacagttcaatatatatatatatatatatataaacatatttacataaaaaaaattaacatctatgtttaggactcaggatcacaaatattaattgttactgtaatttctttttgaaaaatctatattaattatgttctaaatgttactaattcataatggattatgaataaaaaaactaaatcataataaattacgttactcattagattaaattttttttattgaaataacccaccaatatctatagaacaagaatttgctttagaagtataatgatattcaaatattttatctaaaagagaaaaaatgtgattatgtatataatttttttatataaagagaaatagtatatttgtctaaaaaagaaaaaaatgatctcgatatctttacaatgaatactatctaataataataataataataataataataaatgtttcgaaatttgaacttggttgaaccgggaattagctcggtgaccgattttagttggtccttttcataaccggtcaaactggtacataaccggtttagagaacaaatgttgaattggtccttttcatttttataatgttttattttttaaaaaaaattatttaatttaaagtagtttaatataaataaaaatacatacttaatattttcacataagaatcaattgttttgtcaactattattactttttatcttataaaacacataatttagtcttttatattaatttatatttttttaaatcctaatttttttataattatatattagtttattacttaaaatatcatataacattaagaaatataaaaccagttcacattcaaccttgaatcaatgtttttatctattcattcatcagtctaattttaagaaacattgataataatacacaaaaagcacttaaatgcattatatgtacaattaagttcatgattacattcccaaatgtacctttttttatatatattttggaatgatcaatccaaaatgcaaagaaatgtttcataaaagatgcagaaggcaatttggagttaaagaaagnnnnnnnnnnnnnnnnnnnnnnnnnnnnnnnnnnnnnnnnnnnnnnnnnnnnnnnnnnnnnnnnnnnnnnnnnnnnnnnnnnnnnnnnnnnnnnnnnnaacaattttaatcaaaacaactaagcaattgattcaagaaagatatcacctttaatttctcagtgtaatgaacgaaattaaatgatcaaaccagactgagaatgaatgtcatgatctttcttgatgaaatcttttgacaaaatgcttgaacaaaaacttcacatggagtagatgaatcaacaaatgaaaatcttcatgattcttcaatctactttgaatttctgattctaatatgccttggtgactttagaactctcagaaagtgattttcacaaggcttgttcgaaaactcaaaatccacacataacagaataagctccttctatttataaaaaacagaattaactacctgtaatcgattattccgtaaatgtaatcgattattttaactcaagtaatcgattaaaattctaaaataatcgattaaagtgttcatcagaaatctggaaaaaatcttaagaacaaataatcgattaatccttcttgtaatcgattattctaggaggtcaggattttctgatacactactgtaatcgattaatgtctcaaataatcgattatcacaggaagtgtgaaaaactcaacaatgcatatttaatcgattacaacaatctggtaatcgattaaaaccagataaaatgcttctgtgaattatgcagagactcagataatcaattatttcatgaagtaatcgattatcacagaacgacttaacatagtcaaactaatttaatcgattacaaattattggtaatcgattaaagtgttcttaagacaatatgcagttctgtctatatgcatttaatcgattatatcatattggtaatcgattaaaacagtgaaaaataatttttatgaaaaccttattgcctttatgtcataccaattgattaataatatcatatgacttaatcatgatttaatgaatgaacgaatgcatgagttaatcaaactaagttaggaataagaggttttaacttcttgaaccaagcttgaacaaatacatatgccatcaattgagtgggcatgtaaaatcaaaacttgtaatcttcctcagcttgattcttcatgatcttcttcatttctaacactttcttttgtggatccaccacttttggataatctgattgccctcggtgagtccgatggtcctaacgcaatcagatcttgaagcaaggggttgtatggattcaacacatccaacttgatctgaacattttgtctttccttaggcacacacttttcatcttgaactagtcaccccagccttccttaaggacagaaatcttgagcagaaatgtatggaaggagacatcattagaggcatttctttattagtattcatgcctttgccaggacaaatgttcttatgcacatgatgctcttgaaagatggaaaatgatgatgactctatgttaagagatattgattttatactatccatcgcacatatacctttcttaagacatcaacaactctcgtctttgacgagcaccatctgttgcttttgctccttcctcactacagacatatcccctggctggcatgactacttttctcctatatatgtttgacaaaaattgttttgttcttcagtatctgctttaatgctatccagacattcaaatttatcatcaaaagcagtaagagcactatcaatatctcctttagtccttaattgcaggcatatcccttggcatggctactattcttatcttcaaaatgtgttttagtaacaatgtttcttactttagcttcttctttaatcttatcctgaattttatcccaagcacatctttcctaacattataacttccaagtgatgtgatgatagttgtaagaatattgattgatgtgtttttctttgaacgataggatacatagaatttatgatgaatgagatagtaaggagaatattgagtaagtatagaaaggtgggaacttagtttacaggagaactagtgtttttatttttgcttgcttgctttctttcgtgctttcataaactacaaggctttgggggtatttataggaatctccacttccttaacatgtggtctacatttgtgtatctagaaactctattctaggttattctacaactcctaagtcttctagaataatctacataagtacatttttttaatgtctctagattcttctaaatgcccctagattcttctcttaatttcttcaagcttccataagtttccagaagcttctataagcgttcataagtttctagaaagcttctataagtttcttcatggttctataagcttctagagtattctagaaatgtgtagcattttctaatattcctccttgatgcgcatttccattattccaatcacatctcttagtaatttgagccttgatcttcgtagtgcctttgtgaaaatgtctgccagttgttcttcagtcttgcagtacttaagctctatttatttgtttgcttctgcttccctaatgaagtgatatttgatatttgtgtttggttctcccatgaaattcaagattctttgtcattgctatagcggacttgctatcacaatatatctctatcgcttgattttgttgttctccgatgtcttcaagtatgcgcttgagccatatgtcttgacttgtagctatagttgctactatatatctacttttgctgatgattgagcaactgttgtttgcttttttgatgcccaagagaatattcctgagtcaagtgtgaaaggatagatagcctgaggtgctcttcatatcatccattgatcctgcccaatcactgtcaatataaccaatcagtctcgctttagaagtagactcgtaccatatgccatagttctttgttccttgcaagtatcgtaatactcattttgctgctttatagtgaacttggcttggaatctgcatgaatcttgataatatactagtagcatacataatattaggtcttgtagctgttagataaagcaggcttccaatgaggcttcaaaattgcatgctatctgcacttggtgtgccatcatcccttgttaatcctttgttgttatctagtggagtagctactttcttgcagccttccatcttgaatttcttcaaaagattagtagtatacttcttttatgagataaatataccttcttttgtttgagctatctctattccaagaaaatagtgcattagaccaaggtctatcatctcgaatgtcttcatcatatcttcttttaattcttggaccatcttctcattgtttcttgtatagataagatcatcaacatataaggggacaataagggtgtagttgtaccttggttcttgatatatagtgttggctcacttttactcctcatgaatccttgctcaataaattggctgtctattcttgctcaatgcagacttgacatctagttggtaaatcttccacttcttttgtacaatcaatgcaatcaaagctccaattgtatcaagtcgtgcgactggggcaaatgtctcattgtagttgatgtcgaattgttgagcatatcccttgtcaactagtcttggtttatgtttttgaattgagccatctggattaagttttgtcttgtaaacccacttaactccaatgacttctttcttttgaggaagatcctctagctcccaagtctcattcttctctttgaagcttcttcatagttttctggctcggtgattgtgaaattgcatacctggtagatctctaacaatgacttagttctccttggtgtcgactctagagatgagtcaagtgattcttccactattgcttgtgttggagatcttagttgctaattatattctttatcttttggtgattctagtaagttgatattctttctttcaacttgttgagcctcccagttgtagaatcttcattgaacttacgtcttgactgatgattaacttctttgttcttaagctatagactcgatagccttttgattgggtgttatagcctaagaaggttcctttttctgttttctcatccagcttgcctcttttttctttcggcatgtggatgtagcaaatgcaaccaaaaactctaagatgttttgctgatggcttttgtccactccaagcttcgactagtgtcttgtcttaaacaactttgcttggacatctattaagaagatagactgctgtacttacagcctctgcccaaaaagattttggaagacctttctccattagcatagatcttgctgcctccattactgttttattctttctttctgacacaccattttgttctggtgcatatccaattgtaagttgatgtttcatgccttcatcttcgcaaaacttgttgaattcattaaaggtgtattctttgactttgtcacttcttatattctttatgttgtagccactttgcctttcgactcgagtttgaatttcttgaaaatattgaagacttgcgatttttctcgtaaaaagtaaaaccaagtcattctagtgaagtcatcaatgaagagaatgaagtaactattttgattatgtgatagagtatgcattgggtcacaaacatctgtatggactagctctaacactgctttggcttgccctggatttcctgatggaaaaggttgtcggtgttgtttcccgagcatgcacccctcacaaacgtcgatgtgctccattattggtggtagatctctcatcatattttatgttgaagaattttcaatccttgtagactgaaatgcccgaatcttctgtgccatagccatgactcgtccacttgcaccttcattgcaacatcacttgcatatatccattgtattagaaaacaacgattctcttttattttgatttttgcaattaagagagatttatcttgcttatcataaattttgcaagaatttccctcaaaatgcaaagagtagcctttttccatcatttggccgacgctcaaaattttttgatatatgttagggaccaagagtacatcggtgatgtatctttcccctttttggtttcaatggcaataatgcctcttcccgttgcctccataaaatctgcattgtcaatttttatttatgttttgattttatcaagactacagaaaatattttcatccttcgtcatgtgattactgcagccactatccaaagaccatgtatcctttatttcttttgatgtatcttgggagacataaaagagaacattctcttactcttgttcttcagagaaattaatttgatgatttagttttaagcaacaaaccttttctacatgtccgaacttcaattcttacaatttcagcactgtgattttcctttaaaccaacagtccttctccaagtgactatttcttttacaaatgccatgtggaggaaactttccacctctttctttatgtttttcttgattctcattgtttctataattttcatttatttttctcccaccatctttagatttctgagattgcctcttgattttagattgaaaggcattttttgtattgctttcaaatcacctttctaatctttttcgtgagcctctaagaacccattaattctgcatctgttaatttatctatatcttttgactcttcaatagctgcaataatgggatcgtatttttctatgcatgtaattaaaacttttccaacaactttattttctggaatattatctccataggctcttaattagtaataataatccctagcaatctcaaaatcattcatttttaaattctcaaacttccttcctaaagtttggagattacaagtttgtaccttttgagatccttgaaactcctcttgcaactgatcccatgttgctttgaacaaattttgaagtttatagacctatacatcagattgatgtaaaatatttaagcaaatcatcctcatttccatgaaaactaatcctgtccaaacaagagcagacctaattttcagatagcccaaagttaaacttgttagttgaaaagttattttctctgattgaatcacataataacttttctggtagtggctgacggaaccaaattttgtcgaacttcaccataagctagaatgaactttcacttgatagagttgcacaatttgaatatcaacaaattgaacccaacgtgaaacgaacactcaaccttctgatctagagtcagaagcgctaccattgtgccgaaaaatccactattgttgcccatgtcatccgttactaccaaatgcatgccttatggttccttgacaactggttagaaattctaaattcatttgtaaaaagatgttggtcagaagtgctaccattgggtcaaaaattcactattgttgcttcatgtcaatgtttacaaccaaatgccttttggttccatcagtgagggacccaaggcactgagtaaaggagtggaatttatttaaaaaataatcaataataattagactaaattataattttaattctcttttaatttctcttttgtgattttggttcaagtctcaatttacacacatttatatatgtcataatatatttagttttcgtagtttatttttatagattttgatggagttaggacaatcttttaaataagagtaaaaaacaattaaaagaataggcatatatttttttttttaaaaaagatattctacatcggttatgtagttaaaaaccgatgtagaaaatgaactttctacatcggttttagacaaaaccgatgttgtaagtactattccacatcaattttttaaataatcgatgtagaacagtaactttctacatcgattttagacaaaactgatgttgtaaacactattccacatcggtttttcaaaaaatcgatgttgattttacatattttacgtttttttaatttcttatttgacgacatcgattttcttaagaaaatcgatgtcgtttaggtatgttaatatcggtttttaaaaactgatgttaacgttaatactttcaacgtcgatggtttcaacatcggttaaaatccgatgttgaaagtccaaaaaaatcgatgtagaaaacaatttttctaatagtgctacaaacaacaaaattttattagttaaaattttctgcgagtattttactgatggatattggtccattagaaatctgtcaaaaatattgaactgtcgacatatttttgggattaccaacaaatatgtgacatcagaaattaaaaaataatattttaaaactatacttgacacttgttagtaattagattctagtaaaaatatttaaactatttgattcattaatactatcttcgaaaattaaaaaatctccgtatttaatattagtatttaataataattaatgctatactccttttctgagcgttacttattttattaataatatcattcacttgtcacattatatttccttgtagttgatgactatctctacaagcaattctatatttaaggctgaaagaacaggaagctcgacaaccaaagtgcacttgatttcaatttctaatccttcaaattttgagccttctatatatcatccatcttattctcacaaagatgctgaacttgaagcacctctctataatttgcagcattcttgttgtggctatcatttcaatgtcagcatgtcaatgcagagtgttgcaaccaaatgatgtgaaactcatagagtacatttgcaagagaaccccaaatcctaatctttgtcttcaactcctaaaagctgacccccgtgcccctagcgctgatattgcaggcctcgcattgattttggtcgatgtgatcaaagccagagcaattgaagccgagacaaaaatcaacgaacttcttaaggggggtgggaataagaaagccttaagtgaatgtgctgaggattacaaagggattttgatagctgatgtaccacaggccactagggctgtgaggggagaccccaaatttgcagaagaagcggtagctgattgtgctgttgaggctgattcttgtgaggacggcttcaatgggaattcaccactcaccaatttgaataatggtatgcatgatttggcgaatgtggcaagggccgttattaggaatttgctctaggtactcattatttcctctttgtctagagagaaaaaaaagtgtcatgcattaataaactgtccaaatataaaaggataataagagacattattgtatgaaaatgaagtctatgtggatgaatgttattggaaatagctgaattgtgtgttgttcacgcattttctgtgttagtgtgataattaaggttggacgaaccaacataagttatagatatatagtggtttgtttaatttgtttatgatgctcaacggagatttagctaggatgaaaaagaactcactttgtttgaagaatattttttttgtaacacataaattaagtttctaaaatatctaataataaagaaggcagtcgttaaaaatgataaactcttatcctgattttcaaaaaatactattatcgatcatatcatttaaacaataatagggtaattgtttaaaatttttaaaaattaacatcaaattcttatattacaaaattctaacgtcggattctatggctattattaaaatgaatttttaatttcttaccagttatcatcaaggaatcataaggcattaggttgtaactgttgactggggcaacattaatagtggatttatggttatatggtaggcacttctaaccctagatcaggttacatgttcagttttcttttcgtaattaaaggatggtgataaaattcagaaaacgactctggaccacatagaccatggttttatattgctttctgcaactgcaattgtgactgtaacattaagatattttgatactccacaaaccactactacaagcaggacattctacgtcggttgtatagcccaatctaagacggttgtacgaccgtcgttgtatgaggtgtcgttgaaagctgtcatttttacgacggttatataacaaccgtcttcgtagtcttaagtttctaagacggttatagtaataaccgtcttagattagtgtaatatactaagacggttattatgaatgaccgtctttgaatgttcaacattctaagacggtttttctaacaaccgtcttaaaatcagttttttttttaaaaaaaaatacactaatctaagatggttattcctaacaaccatcttagattagtgtatctttttttatataaaaaaaatcatgatttctatagtgatgaagcaggcattatgttccactactattacgagtgatgagcataaaaaaaaagttataataataataataatagtaataatatatatttaaaacagtaagctgcaaaaataatatagtaatatgcatattgctattcaacctggcctcacaatgaatgtagtgtggcaagcattaagtaaaatactagccaagcattaagtaaaataaaaacannnnnnnnnnnnnnnnnnnnnnnnnnnnnnnnnnnnnnnnnnnnnnnnnnnnnnnnnnnnnnnnnnnnnnnnnnnnnnnnnnnnnnnnnnnnnnnnnnnnnnnnnnnnnnnnnnnnnnnnnnnnnnnnnnnnnnnnnnnnnnnnnnnnnnnnnnnnnnnnnnnnnnnnnnnnnnnnnnnnnnnnnnnnnnnnnnnnnnnnnnnnnnnnnnnnnnnnnnnnnnnnnnnnnnnnnnnnnnnnnnnnnnnnnnnnnnnnnnnnnnnnnnnnnnnnnnnnnnnnnnnnnnnnnnnnnnnnnnnnnnnnnnnnnnnnnnnnnnnnnnnnnnnnnnnnnnnnnnnnnnnnnnnnnnnnnnnnnnnnnnnnnnnnnnnnnnnnnnnnnnnnnnnnnnnnnnnnnnnnnnnnnnnnnnnnnnnnnnnnnnnnnnnnnnnnnnnnnnnnnnnnnnnnnnnnnnnnnnnnnnnnnnnnnnnnnnnnnnnnnnnnnnnnnnnnnnnnnnnnnnnnnnnnnnnnnnnnnnnnnnnnnnnnnnnnnnnnnnnnnnnnnnnnnnnnnnnnnnnnnnnnnnnnnnnnnnnnnnnnnnnnnnnnnnnnnnnnnnnnnnnnnnnnnnnnnnnnnnnnnnnnnnnnnnnnnnnnnnnnnnnnnnnnnnnnnnnnnnnnnnnnnnnnnnnnnnnnnnnnnnnnnnnnnnnnnnnnnnnnnnnnnnnnnnnnnnnnnnnnnnnnnnnnnnnnnnnnnnnnnnnnnnnnnnnnnnnnnnnnnnnnnnnnnnnnnnnnnnnnnnnnnnnnnnnnnnnnnnnnnnnnnnnnnnnnnnnnnnnnnnnnnnnnnnnnnnnnnnnnnnnnnnnnnnnnnnnnnnnnnnnnnnnnnnnnnnnnnnnnnnnnnnnnnnnnnnnnnnnnnnnnnnnnnnnnnnnnnnnnnnnnnnnnnnnnnnnnnnnnnnnnnnnnnnnnnnnnnnnnnnnnnnnnnnnnnnnnnnnnnnnnnnnnnnnnnnnnnnnnnnnnnnnnnnnnnnnnnnnnnnnnnnnnnnnnnnnnnnnnnnnnnnnnnnnnnnnnnnnnnnnnnnnnnnnnnnnnnnnnnnnnnnnnnnnnnnnnnnnnnnnnnnnnnnnnnnnnnnnnnnnnnnnnnnnnnnnnnnnnnnnnnnnnnnnnnnnnnnnnnnnnnnnnnnnnnnnnnnnnnnnnnnnnnnnnnnnnnnnnnnnnnnnnnnnnnnnnnnnnnnnnnnnnnnnnnnnnnnnnnnnnnnnnnnnnnnnnnnnnnnnnnnnnnnnnnnnnnnnnnnnnnnnnnnnnnnnnnnnnnnnnnnnnnnnnnnnnnnnnnnnnnnnnnnnnnnnnnnnnnnnnnnnnnnnnnnnnnnnnnnnnnnnnnnnnnnnnnnnnnnnnnnnnnnnnnnnnnnnnnnnnnnnnnnnnnnnnnnnnnnnnnnnnnnnnnnnnnnnnnnnnnnnnnnnnnnnnnnnnnnnnnnnnnnnnnnnnnnnnnnnnnnnnnnnnnnnnnnnnnnnnnnnnnnnnnnnnnnnnnnnnnnnnnnnnnnnnnnnnnnnnnnnnnnnnnnnnnnnnnnnnnnnnnnnnnnnnnnnnnnnnnnnnnnnnnnnnnnnnnnnnnnnnnnnnnnnnnnnnnnnnnnnnnnnnnnnnnnnnnnnnnnnnnnnnnnnnnnnnnnnnnnnnnnnnnnncactactacaagcaggacattctacgtcggttgtatagcccaatctaagacggttgtacgaccgtcgttgtatgaggtgtcgttgaaagctgtcatttttacgacggttatataacaaccgtcttcgtagtcttaagtttctaagacggttatagtaataaccgtcttagattagtgtaatatactaagacggttattatgaatgaccgtctttgaatgttcaacattctaagacggtttttctaacaaccgtcttaaaatcannnnnnnnnnnntattcctaacaaccatcttagattagtgtatctttttttatataaaaaaaatcatgatttctatagtgatgaagcaggcattatgttccactactattacgagtgatgagcataaaaaaaaagttataataataataataatagtaataatatatatttaaaacagtaagctgcaaaaataatatagtaatatgcatattgctattcaacctggcctcacaatgaatgtagtgtggcaagcattaagtaaaatactagccaagcattaagtaaaataaaaacannnnnnnnnnnnnnnnnnnnnnnnnnnnnnnnnnnnnnnnnnnnnnnnnnnnnnnnnnnnnnnnnnnnnnnnnnnnnnnnnnnnnnnnnnnnnnnnnnnnnnnnnnnnnnnnnnnnnnnnnnntggcgtcgaagggggccaaaggaagcaatttagggtttataaatgggaacttcaaatacggttatttaaatgaaaccgtatttgaatttattgaagcaacgacggtcccttagaaaccgtatttgaataattagatactaagacggttgtcttataaccgtcgttggtgccaacaaacaaagacggtccaatcaacaaccgtctttgccaagtgtaaaatattacgaaaatgccaccgcttactctactaagacggttatctaaggaccgacgttgaaagcgtgtcgttaaagggtatttttgtagtagtgaacgtatcatgattataattgcggctacatcagccacattttctctcaattgcccaaaacggaaagattttatggctcatcgcaaccgcaatttaaaatcatgacctaaattaaactataaataataaccattaaattgatctcattttcgtaatatttcggtgcacctttcacattgtaacattacctctcaacttctcccctactaatttcctctccaatcaatggtcgttatcactggaagcaatttttgacgacagcattttgaggtttttttttattctgtggcactccgtaacttgtaaggaaatacatatattatatatatatatatatagatatagatattgttgttattttgtgcacccctaattttataattttaacccccttatcttaagatttcaatcgtttgccaaattttgtcttggattaattaagtttttaatccttaaactttttgacattcaaattttagtccataaccaaaaatttgtctggttaaggtccctaaactctttttaaatttaactttttaatccctaaacaaaagtttgacttctcaagatctctcaattttttccattaagttttttggtccctaaattattgtttgacggttagtcaagatctcaaaacttttagaaatttcagtttttagtccttaaataaaagtttgaacccattttttttatttatttaataagatttaagggattaaaaactgaatttttcaaaaattttagagactaaaaaccttaagtataaaatgttgaggaaccttgattagtcaagcttttgtttagggaaggactaaaagtcaaatttaagaaaagtaatttttaaactttggttgtggagcttcaacatagaatgagttaaataatggacgtagaaaacactgtctacagtagtgttctggttcttcaacttgattatccattgaaatcaagtgcactttggttgtggagcttccgattctttcagccttaaatagagaattgcttggagagatcgtcatcgactataaggaaatataatgtgaaaagtccatgatattattaataaaataagtaacgctcagaaaaggagtgtagcattaattattattaaatactaatattaaataagaagattttttattcaatcagtcaaagatattattaatgaatcaaataatagtataagtattttgacaagaatcagaatactaacaagtgtcaattatagtttaaaaaaaaattgtttttaccgccattatgctcatattctctaagttttttcacttgaactttcactagttcacatttgatctttagtaatattttttggtctaacactttgtaaaaatattattaaaaacttttgataatatttcaaaaaatatggccaaatataaataaatgttactaatatatttacgtaacattgggagatctaagagctactccaaattgtacttatgctaagaatgtgattaaacaacaaggagaataagattatgtaattttctttcttaaatgtcttggagaagcatatggaattgctagaactcagattttgcttatggaatccttgccttcaattagcaaggtcttttctcttattattcaacatgaaggacaagtcactaatggaattgttgttgattcaaaggttttggttacttcatctgaaaaccagaacatttattccttttgttacggattcatagattgggctctgtattaaggctcattaagaattggtcaactctgaatatagactataactgcctagcagaatcgagagaaataaaagataacaactgcatggtaactgaagagatatttataataaccaaggcaaaacaaaaacgttagcgacgtacttagcgatggaattggtgacagaaatggtcctggcttggatagcgccagaagtgctccagaaaacatattttctctggaatctggcacgattagcgccaaagtggcgcggttagcgtcagaagtgctccataaagcatattttctctgaaatctggcacggttaacgctaggacgcgatctgggtcactgtaaaagatcatttcacgcgttttgggagccaaaaacccatcttcttcttccttgggacgtttccaccattgttgaagaggaaaaacttcataccactcaaccattgaccaaaacacttcacacccaacatgaaacttgaaggaaatcatcctatgagctagattccatcatcactttttttctaaaaaccatcaaacggagagatcgttttctctagggaacttcacaaaacttgagtttagcgaggaaaggaggcgatttacagacacccaagcttggagaagttgtcctctagccttccttgtcgatttagaggtaagaaacacaaattctatcgattatttgagaattttttcttgaggtgaatagtgacccatttgagttcgagctggaattaggcttgggttctttagaaaagtatgttcagaaggttgttatgatgaaggattagtctcgaaacaaaatttttatggactttggaatttggctctgaagaatgtatgtgtaggatgaatgttggttaattggtgatcttatggcatgcatgagccttgatgcttgtataatatgtgctcaagaggctatataaatagtgaaattgtgttgaagtaaccattttagctatattgttaatctttgagttttggtttgaatagagtgttaaactctttgaattggcttatgcagagtctttgggagactctagtaccttgattaggccgagatagatcctgctaagggtctgtgagtcgcctattaggtggttagttatgataactttaagataaagacaaagaggtttaaatggaaaggaataacgtttcttttcattctaacggttgagaaccgttattgagtctttatatgcctttatgtagggcgtggtacaaagattacttgtggttgtgaccacaaagtcgggagagccggtgtagcgctgagagcaggtaagctcgttgttcttggtagtgtttcccattgactgtgttccaccatactctgagggagtgatggttattgtatgccatgatgcatgtgtattgaaattgtgtgttactgcttttattgagaacatgtatatgatgtacactgtgatgatatgttatgtgattgatgagattctctggctggtaaaatagattacttatggacttcctttggaaatgtgcccttaagtggaagatcttctcttggaagtgccatagatgtccatgtaagtcctgagagaatgtgcccttcagtggatgatctcttaggcattgacatgaagtcctgagggaatgtgcccttaagtggatgattttcctcagacaatgtgctcagagtcctgagagaatgtgcctttaagtggatgatctttctcaggcaatgatgcggaaagtcctgagagaatgtgcccttcagtggatgatctttctcaggcaatgttatatgtgtatatatacttgttatatctgtgttgcgttcctgatgttggtagcacccaacggaacctgtgttgtgatatacatgtgatatggtttatgagggccatgatggctggattgtgtgtgatgccaattttaatgctatgtgccatggaagtgaaccagggggaggagagagctccaagaaccctgagtttactgagatttgtatctcaccccgtgtgtggaaattatgttttacaggtgatgctcaacgagtggatggtggatcccaggacaagaagcccgaactctgatatgattttgagtgaaccttagtcgtatactttgagagcatgttggctcatttattttgttatgcctgtatttgtacccctgaggggaggatgcacagttagtgggtattttgtatgtgttatacatctgagagatattgatgtaagttgagaggacagggtatatgatcccttattttgtatagccattgttgagatacttttactaagttatatggcttattttggtcctctgattatatgatgcgtgtaattatcatacataatgtaaatatgttattgatgatgacatttgatgacgtcattttgtttattgcttccgaattgattagtcttaaataattgctgcgcttaacaaccataaatgaatgttaatgaaccggatgcatacggggggttacaatattctccaactaacacacaggtcgtgattataaatagagatattttcagaaaacaaggtacacaaaatctactctctcttatccatttacactgtgcacacacctcacgccattggtgtcgtttatacaagcatagtgatcttcttccctgaggtattcaatcttcataaatacctttagagagagagagagagtttgatccaacataaattttctcgcaaaccttgctggacatctctgttcataaaaaacataacattggcaccgtctgtggggacgttaaatttcaaatcccacgttcccgatggtagacacaagaagtaactcttaggccgcacacccacgttctgatgcggaaaaaggagaggagaaagagaacatctaaattcgcatgttgagaaaggctgaaactgttatcctttaatcttcttgatcgccttgtttaaccattagattttgataaacttttataaaaagtttgtgactcatcactattcacatctaacggttggcttatttaatagaggcttgtagcatcacccgaaattcccaaaccgaaatggttcagaatccgttttctaaagtaggaagcggtattgagagggacatttatttcatactaaccgttggatcacgttcaaactttgaggaaacattaataaaatctgtttatacattctgaccgttcggatcattcattgaagcgttttcaagagggaatgtttcaactgcaaacaaaaggttatcagaattcctgctctgttttatcttgtttcaggcagtgatattgaaaaaaggttatctcttttatcaaccgttggattatcctcaaatttggttggtgtgttcctcccttgtagtaaatcaatttgatcattgggatttgttaattattatttctggtggtaggaattaatttcgtacagaagcctattttgtatgcttacctcttgtgatgttttggtacaacttttgttgaaattgtttgttgattgtaatggttgtcggaacccttgtgtaatctcattttattgatagtgaagaatttgggtggactccggataggttccatgatatttacttgtcacattgagaaggttttcctaacttatagagcagtgctttagatggaggaacatggagaacccaacttataatgagaatcgaggaatgttgtacaaatagaagccaatccggacatacagttgcgaggcaatgagtccggttgagatttcatccgtgtcgctaaatcggatgatgggcccttgggaaacgataaaatttgattcctacccaataatggtgaaagcataacagccgcaaatcaaaatcctaatatgatgggtgcagagaacaagaaggcagcctcatcaatatagaatgtgagattcaccaccagggaagccaggttggcatatgcgcaatatcactttatgagggtggatcttgtctcacgaacggcaacagagattagattaagcaaaagctaagtcttctccccctttttctaatatgaagcgtcagaaatcattctttatagtatttttataataatatatgagtaagatattattatttttgcatctcaaatataattaccgtaagaaattgattaatcaattaatgttggtaataaatttatgtttattatgaaatgattgaattgtcgaagtcaagtaatgtgatcaagagtgctagggttatgaaactgacgttaattcctaattacccttattgcaccaagtaaatgatctatgctggatgcaccatgatgttaagaattatggagataatttataattttgagtttacatacgaaaccaacccacgaatcaatttttgtgctatagaagtttttataactattataatgcactgtgatgtgaatggtgcctttcgtcaattatacaataattgccattacaattttggaacaattaattttatttagtatgtataagaacataatctttatgatagatttataataactattcaagccagttatttttcgcaatacatttgtggaaaatatgcttttaatcatctacagtattgtgattaatcaccggatattcttcacagggacaatgatacccgagaagggagagagtggaagttaactcgaccagccattgaatttgacaatttcctttacccgggtagtgtagcctgtacgtggaaaattgtttggaagatgctggaagataacaatatgaatagggatgattgtcattaattggaaataaagtgttcatatatcgttttttccaccataatatagcttagcaaaatcaagaaagagaggcaaagaaaaagaaattgccggattatatgcagtatcattgagaagagcaaaggaatctggaagaaagcaaatgttgatctcgatagtggcaggaacctggttaaatatttgcaggaatctggaagagttctccctggccaagattaaaagagagcaattttatgctccattccaagggcaatactaaactattcgttgttattaccattattatccatgttattcttattgtttggatttgcagtttcagaacaaaacgccaattgacatggagaggacatgatacatgtgaaactttttcatatattcaacaagttggtccaatcgaaatttagctggaaaactttttctagcctcctgcagcgttgtttttaacaacaactatgtttggacaaaatatgaaaccacataatacacgaatgtcaaataatgaagggaaggctctcgttacctttccaaacaaaatgaagattgttcgagtcacaattcaacacaaggaaaagaaagtgttaagaaaattaaggaggcaaattcgtttggtggctacaaatgaaagacaaataaacactgctgatccgggttagctaaattggatgggctccgttcaagtgaatcatgatgatgagataagtgaattatatctcaagttatcttgtatatgttatccatgtatatgcatgtggaagttatgaagcttgatattaatttgttgcattatggcatatgattattgagcgttctaatgtccctgcagaataatattattaaacttgcactgatgaagaaagtaaagtgaaaaaagcaatcggtgattccagtagttacggaagtgatgcatattccttggaaggacaattgtgtttggcatattaagttcaatgtttcagacttcaattaaagatgaagttcaatacaaggcttaggtccaaaaagccaaattgaaagaataaccaaggcaaaccgagctcaagaaaagaagcgaacgctacttccccaaatatcaaatcaaaatgtcgacattctttgtttttggtaaattacgaagaaagtcagctcagaccatgacaaatgaaaccagattcaaataagaaaggcaccgcgaaagaaatggggcccaaattaaaaagtccttcaaagaggtaaaattggtttccgtaaccataaaacttcgaaaaaagtcaaaatgttgtatcggccctccggaatataaatggtgtgtcggccctccgggatataaatggtatgtcggcccttcgtgatataaatggtgtgtcggccctccgtgatataaatggtgtgccggccctccaggatataaatggtgtgtcgggccctccgggatataaatggtgtgtcgatcctccgggatataaatggtgtgtcggtcctccgggatataaatggtatgccggccctccgggatataaatggtgtatcggccctccgggatataaatggtatacataaaatggtgtactggccctccgggataaaaatggttcacaaatcaaatggcaagaaaatgcctcaagcgacaacaaagtcagtatagaaaatgccgacgaatgaagccgggttgttaatcaaagatcagcaaagccaaatggaaaagctatggtgaacaaagtcgggcttatatgcaaagccaccaaaaagaagccgggttcgaagagtaaggaaggacgcttccgaaattcgaaatcgaggctgggttcgaagaataaggaaggacgcttccgaaattcgaactctgttaaaaagttgtaagagatcttgagggtaaagccctagaaagggttaaaaacttaagaattgattgcttaagggtaaaatctgaactggttaaaaccttcaactaatgataaaatgggggtataaaaataaaccttcatgtgtatgatgcaacaaaaagttgtattctggactaagaaggtgaactgacatgatgaccttgatcaagttgaaaagtttaaggtcttggtgaaaaactgagattgaacatgtgacagattggtccggattgaattctggtaatacgagctggaatgtaatgtgatgaaaaccttcgcataatataatacctggcttttaataccaaatgaatattcaagcagactttgcataagatatttctaactttggccaaatcattgaatagaactctaaaagtgtttgagttcatatgttaatgtgaaaatggattttggagttatgtctgatttcattgaatagaactttaaaagtgtttgagttcatatgaaaatgaatttcgaaattatgtctgatttcattgaagagaacttaaagtgttttgagttcatttatcaaaaatctaaaggtgtgtgtcttctctcataataatccgggttatgggaaaaacctgtcgttaaaacagataaaccccgaaacccggatggcattcaaatgtgatgtacaggaacttcaacatagaatacaccccggctatcctagggccttgacatacagaatatcccgatctaggattatcgataatggagcgtgaaaaggcattaaagaattaagttacccaatccaaactaatacatcccggctgtcagaagccttgacaaccgggctgggggacaactgtcacggattcatagattgggctcactattaaggctcattaagaagtggtcaactctaaatatggactgtaactgcctaatagaatcgagagaaataaaagataataattgcatggtaactgaagcatatatattcccaacaagccaaagatctctgtcgaaattatggagagatattcccaactaacagacaggtcagtgattataaatagggatattttcagaaaacaaggtacacaaaatctactgtctcttatccatttatactgtgcacacacctcactacattggtgtcgtttatacaagcatagtgatcttcttccctgaggtattcaatcttcataaataccttcacagagagagagtttgatccaacataaatttttccgcaaaccttgctggacatctctgttcataaaaaacaaaacacctttcaaaaccaaaattacctttggaaatggaagaggtcaattcactcaaggaagaggaagtcgcacagcaaaacactataccttttgtgatagaatgggaaacaatgttaggaagtcccatattgtctgtcttaattctccgggtgcacaatagttagacaacttcacttagcaccaattagttttaagctgaaattaatctaacaacccatgttactacaaacatggtttcccgctaagaagactttgtttcctcactgctgagcaaattcaagagctgcttaatatgctgcagcacaacaaaatccagcctcactattaatcaagtcagttcatttgttgggctgtcatatacattaactgtatctagacaaatgaacagagaacctaaataaaactacatgtgacacacaaatatcataggtcaaccaaagacaatgcaaaaaacagataaatcacattatgtcaaattttaagtatttaaaatagagagatatgaacagaggagaagattgaacgcagaatatgattctcattgcataaaggtatttatacagaaaagtctctcactgtttacatgggtaactaaccaacaggaattaaaaactaactaatatgtctgatttccacccaccctgagtaaccacttaactaagttggactgcaattgtttctgactgattattttatatcagcagatatcatgctccaagctttaaggttttccactatgattggttcagtaccattgttgaacacaaacaagtgcgcttggttcatcactgctagctcaggatagacccgggacaaaatgtttgtcttccctcctgctccaaaactctcaactaccgagtgatcaatctgctatttatttgagaaaacaaagaatattaaataattatacattagtatttttggagctcatgatgctatatataagcaccgaatggaattaagtttgcacataccaaactcctaagaaagatcttcttatccacggccaaatcgacatctacaaaccccgcaaattgtggtttgtacaggttactcttcaaagatgaactattcagaaataccaaaaacaaaaataaccaattagaagggaatacaaaataacaaaatatcatataattaaaataacttaaccccatccaatgaaattctccaaccacttaattttatctcttttggtcctagaatccatcctatcatgaagatatagaaagaaaactagaagttctcatcccaatttggaatagactaaccttctcgcatcagagcataagagaactacatgcttatttggacttttgaaaactctgaaaaacacaggagtgaactcttccagattttcagaagccaacgtcagaagtccaaagggtccaacaccaccctgttgttttgaacccttttgggcacatagatcctgcgcctttacccacttaggatcatatgcctctgccttgtccaagcttgaaaaggtgaacgtaacttcaacatctgcctgcagttacataataacattagttttatatcattatatgaatttatttgtatgagcagacactcattaatgcataattaagaattggacctgggcagcagtgattccttttacttcactataatctcccttctcaagcttttgattgtctatgttaacttctttgcctctgagactgtttaactcttcaacaggccattgcaccaattgtttcccagtaaaatcgatccacacagttcgaggaattgcctaattattttaccagacagaaacatgcatattacaatcccagtaactactaccatcactcacaacaaaacaaacaagaaattaaggagtgcaactacagtcaactttttttttttttttttaaccttaggttgaaggaaatgcatacatataaattcagtacctgaattcctgcccatcctttgagaatattatctattggtttatcagactcgtttgcccaaccccacaagatcctccggttcttgctggggtcaaaaaacgacttggaagcatagaagttgccataatcatacctaagtccgccccaaccatccactgaagtgttgtcaggcacatacctatccttatcctccagataggtccccacagtgtagtaatcaaacttagtatcgtcaaggctgttcttcaatacatgtttcacaggattccccattacatttcctatagctgaaactgggtaaaagtcagggcactcccacatacccgtaccacccttggaatggatagggtgtttggcccgaacccacgtcatgaagtccttgctcctgtatagataagctattcctctgcgcttccttacactgcccaccagcatcctccagtgaccatccttgccccaccaagctgttgtggggtcacgaaattcagtgcggttaacatatttatctaccacaacagggttgagtctgtctggtttcacccatttccgaagaagtgggtcatttgggtcttctggttcggcatagcattgcacttgagtgttattttcgtctataattccagtgtagaggatcacgggccccttaccagggactatggtggcagaccctgaccagcagccaaatttgtcaaagggctttgatggataaatagcatgttcaatgccattccagtttatcagatccttggacactgagtgcgcccacactatgttatcccacactgcgcctttggggttgtactggtagaacagatggtacactccattgtagtacattggccctgcattgttgacagttaaaagtgtaagacggtgtacacaaatatatggatgtttgtcattgaaaaattaaaagtaaaatataatagaattatgaagttttggcttaccatttggatctgcatgtgattgacgcatccgtacagagatataggaaccatgaaaggattacatgcaaaggaaagaaagttatattaccttgattggtaatggaaactaaaattataaaatttctacagaatatgtttatatatgatagcgtgagactgtcgaaataagtaaaagaagcatgtattttattgtaatatttttttggtacacattttaatgttatacaaatagctaaaattaagcatttcttgtaaaaaaaaaaggaaaatattaatttatactatccaacttgattcacaatgttatcaaaatgcaggagtagcctacttatttgattcaaatgaaagaaaagttccatctttaacaattaacgtactgcaatgatgtgcatgagtactaagagaaaaaatcataataaacttattgcattatgttgcacttttcattccaatcttggtttcttactccaaacaataaacattaaaaactattacatttcatccctttcccttccatctctttctatcaattatcaaaatagccttaaacaagaatggcatttttttttgtatgaagagctagaggacaaaacaacctaaataatacaattttaataaaaaattacgaattttggacctgtctgaaaactatttacaaatttgggacaacaggacacgcccaaaaccaggcgtgtcctgctgctataaaagctccccagattttacttttccatcactttttactanttttttttttttttttgtatgaagagctaggagtattgattgttaattaaaagtgtaggcaaatcaaaaacaagacttaacattaaaatcctaagtcatccactgtcctacattacagacacagaaagagacgggccaaaacaattaatttactaaaatgccttttgaaatcatatgcaccaagggcaacatatcccaatttagggtcattaattcattcataattttgaataatttctcccaactattatttagtatgatgaaataatattatctgcaatatgaaattcacacacacataaaatacaatcaaacataaaattagatccgtgtttcagttaaccacttaagctatgtatggatcaaactatttgcattgtactcaaacatgagagtaagcaaataagcctaggagccaaacatcatatacaccaagtgatcgagtacataaaaccagcacttccagcacaccatacaaaccccaaaacaaattaatgcatcttgactatggttttaattgtggtcatggttgtaattgcgttgtggtgaattataaaatctttatatagcagcgaattgtgggaaaaatgtggctgatgcaggcgcaattgcagtcgccgtgcatttgcaaagagtctaaatacattgacattgcagctgcaattgtggttgcagaccgctattaaaaaccttgatccagacttaaacaactttgagcaatattcatagcctattgaaaacccctacagaatgatgtccacgaaagaattgaaagaagcttacaatctatttatcctgtaattatccttttcaaagggacacagttgctttctagttcttaataatgcagacttacagcaattattaaaaacagaatcacattttattttgtatgaagagctagaggaatgattgatcataaaacgtgtaagcaaaccaaacacatggtgcattaaacctaaaatcctaagtcatccaccttacataacattcacagaaagagaggggccaaaacaatcgattcaaactaatctgatctatgatttacaaaaacgctattactatagtagtttgtaaagttgccttttgaaataatatacccccagggcaacgtatcccaatttagggtcaattcatttatatctttgaataatttatatctacagttatttagtatactgaaagaatattatgctagcatcatctggacatacgaagttcaaacacaattacaatacaatcaaacttaaaattagattcattaacctgtttaaaaaagctacatatggataaatatatctgcaatgcactaatttggtaaatgaaactcagagtaagcaaataagcctaggaaccaccaagtgaatacaaaaagccagcatgtccagcgcatcatatacaaagcccggggcaaattaatgcatcctgacttaaaccactttgtgcaatattcgtagcatattgaagacctctactgcaatatgtccacaaaataattgaaacaagattacaatctattcattaattcatctccttttcaaagagacccagttgttttctagtgttttataatgcagacatactttacagtcaatgattaaaactgactacagaatatggcagatatgcaaaaatgaaaatataggtccagaaataaagtcttcatactaaccgttcatccagtttttaaggggctggaaatggaatgcagttctgtgataatctcttctcagtgaaaccgcttcaatgcaattgttgattatcagcaacaccatggagtaaaacaccacagacatcttggtgtttgcaagagccatctgaaaaatggacacccaaatcagtacatcacagctccaaagttaattaccaagaaaactcacaagtcacaacaggaaatggaagctttgctggtacattgggcagcataggaacaaatgcatttttcgtcagcaaataagattatataatattaataggggacaagttccaaaatgcaagatgtaaaatgggaagcagcctcaaaaaatacaaagacgaaaaaggtcccatgatgaacacaaaataaagaaaatcagtcaaaacaacagaaactcatcagaggaaaaactgaccaatcgtaaaaggagaagttgaccgaggctttgatctaaacactaatgagttcaataagtggtatttaacacaggttcattgagtcacttagtgctgttattggatacatattcttatatataggggatgctgtcctggtatcatttgtttttcaattaaatttcatttgttttattgcattgagtattattatagttgaacatcttggaaaggtaaaagtggaatcggtgattccatacttagtttcccaatatggaaacttgaattaattaaatgctttgctatgttctgtgagtaattcttacactacctagtacgttatatgcctgctgtgaaagtcattttcacaccagcatgtacgtactactaaaattactctatatatatcccagggcagaaagggtttcagacctggattataataaaataggtgacttctgtatgagatggatacacacaaataaatgcatttgccaatactagcataagcttagtcctttatttaattgcatgcgtataataataataataatatgagaggaatatttcccctatatgaacttcagttggaccaattgagatcacaagaatattttggtccccagtccttttaaccattctctgctgtgcttccagctagacaaataagagaagatttttgaaaatatggtaactgtaatgttaattcctcttgagatcacaagattgttcccaacgtttgacgcctactttgtatgaatttgtaagttgagattgcttttaactatagaaattgattaaaatttttaagataagagcttctaaattttgttataaaagtttttaagtattaaaaaaaataatttttttttgtaaaagtgagatagataattatatatttttatggatattatttcattatttttttcttctaaatatttactgaaaaaattgtacaaactgagtcctaatatcatattctttcttagcattattgctataaattaatggattgaaaggtatttagatacgagggatcgagtcttttattattgttatatataataacatgttccaagagataaaaagagctgacaaaattagattgagcgaaaataaggaaaacatcctatttttttagcttatttacaaaataggagaaaggaaaactaactaattaatatgagactcacatgagagttttctctgtttgagaaaagttaaattttgagaaaataattcacttgttttaatttattcatcgacttatctttctcatgagatgtgtagggttcatttgattccattcattttgttaaggtaaaagacattatattacttgctcattttttttttacctatttttgtatacaattagtttgataaaaggaaggttaatccgtaaggtaaaactaaagtccaccttcaattagttagatctaatagaccagcaaaactagcatttgtttgagatataaaataaagagaaatattacttgtataatggagcgaaaaagaaaaattttaaatgtaataaattaagtgatagggagagattatcctaaattgatattgtataaatttgtgtatgaattgttttatgtatcatatttctaaaataaaagccttaagctgatactcaacatgctttataaattggttaaatttaatttttgacttacaatacaaattagttataaaattttactgtactcaacttttataaatatcaacttcttaattatatctacattattctgtcaaaaaataatcataattacatatagcacatacgatattctcaagaatgtcgtgtgcctccagagaaccgacgagctcgttgaccgtgagtgttgttaggtcctttgacttctttatagcacatatgacattctcgaaactttcagttaacgacatcaacatcttctacacaacacgcgcatcggttaacgcttctctgtttcggttgagttggttcaccacgatttgaacacacgtgatgtagtcggagaccccttccgactccttcatcttcatgctttccaactcgccacgaagagtttgaagatgaacttgtttaacccgattagctcctttgtagacattggccaaaatgccccacacttcttttgaagttattgcactcacaatcttctcaaagcctgactgtcaacagctcggaacaacatgtacaaagtcagcttatctttcaatcgcgtctctttcaacgccttgtgttgagctgccgtatatccagtagtagttgcaggttcttcgaaaccttcttggatcacctcccaaccatcttgagacccgagaagagctttcatttggatgctccaattttcatagttcaccttcgttggtcgaggcaatgacacattgttggtcatactcaccattggctcttgataccaatttgtagaattggaaaaatttatgttgtgagagcttgtggaaaataacttctagaaaaatctttattcaacttctttctcttctgtcttgtcaaacaatataatgatctatttatagactataatttgtccttcaagaacttaaagacttaaattttattaatagccataaaccacaatcgaaactcattataaccattcatagtcataaactacaatcaaaacccattataatcattcatcaaaaataataattgttgactctttccctttcattctcttaaaacaaaattgctgagttaatactattaaaacaaatatttaagtttattcaacaacttcaagttcagcatctttgttagaataagatggatgatatatagaagcctcaaaacttgaaggaaaagaaattgaaatcaagtgcactttggttgtggagcttcctattctttcagccttaaatagagaattgcttggagagatagtcatccactacaaggaaatatagtgtgactaagtaatgatattactaataaaataactaacgctcagaaaaggagtataacattaattattattaaatactaatattaaataaggagattttttaatgaatcaatttcgaagatattattaatgaatcaaatagtttaagtattttgactagaatctaactactgacaagtgtcattagattgagcgaaaataaggaaaacatcctattattttagctcatttggttgtagacacatgttgtggactcggcaagtataccgttcgtacaagtaataaagtgataagaaagatatcgtcccacgaggattgtttgaccaattaaattaaattaaatcaataagttggataacaaataaaatgaataaggttgttgttgttgtgtgtgtgtaaaataagctagattaaaacctaaatataaacatgaatatatggacaaactatggaggattataatgatgtatgtggttaagtagttagggcaatccacactaaatgctccctgcccttgtgcatgtattgtctactatcctcatcaagcccaagttacgcaaacatgcatcttcatgcaatgatagctaagctctactcccatagtgttcttaacactttaacccactttaataccctaatcccttagtgatattggttaggtcaagcattaaatgatgtgttaatcgaggaaacacgcgtctttttgttaatcatgcgtccttttagtgaaacacaaacagtaggcagatactttttggtcagatactttttgataacaaaatttctttttgtgaagctatacaaacagttaactacaattaattttgcgtctaattttaacctaaccataggtgtacatattagacatttttgctaaaggcatgcttgtcccggatttagatttgttggatcagtcgcttgtgaaattgattttggaaagcattggtgatatgaaacatgacttgatgttgtatgaaacttgaactgagtgtgtgaatgcttgtatagctgaattcatttgaaatggaaacaatgtttgatctgatatcatcatgagtctagcttgataccatagccagtgaggattgtgcttatacagttaatttcttttgagggatgcctcactttgataatacactagaatttgatccatttctctctgatgcatgcataagttgatgtgataaaggcattttgttctatttagtcagggccaaatagacttccttgaatttttaccattgctagccccttgagcttgagacctttttgttcaatcacctgacataatacattaaccacttaaattcctctaccttaattgagattggacagctgagtggttcagaaagaaaagcatataaaaagcaaggtgaattccattagaaacttaagggttgaaaagttaaaggatagtcttcaagtgaagccgataatgaacaaaacgaaaaagcaatgttaagaaaaagaagaaaggaagagaaaagaaaatgataaaaagggagtaatggaatgaaaaaccagtttcgaattgaatgtacctgaatttagcagggttcaatctcaatgattcttagctactgtccaaaattctcccacccattgagccaggccaagttacaaccatatcaagaccttttgtgtaacgccccaatccgctaatccgctaatcatggtcattaccaaacatcaaccataaacaaacataaaatcagagtttaagcagtttggaagcatactatacgagtgacatcatcaaatgtcctctacatacactgtacatatcgtatggtgaatatacatacatctctgttttatacaaaactatacaatatccactcagggtataataaaactaaaccaaaggctacatacacaaaatcagagccataggctcatatcaactagcctaaggtatgcagtagcagctatccttgcttaggctccttgcctcgggatctgtctgctcctcctgaggtgtcacctgtaaaacatagcccacacaaagggtgagatataaaatctcagtaaactcagggtccttgaaggtatttccttcccctggttcactgaccacaaatatacatcatatacatatcataagtcaggcaaatgttagccatacacacatatgtatctcaaacaacccatctcagggcaactcacagaataaacatcacaaatcattatacactgatatcagtgtatacttatggcatatagccatgcatcacagtctcccctattacagggttcagctaacctttcaagcataacagagcatcatacatgcatagaagcataacaagaccatcaggtcactcaatcatccatcgtgcacatcaatgcacaatacctgactacaatcaggttatacacatggctcactgccatttcacacatcaatcactgtcatgaggaggctacatctaagtatataggcacatctctactaagggaggctacctctatatactcggcccatctcctgcatgtatccctagcggaggcttcctctagatatataggcacatctctcacacgaggcttcatctatatatcaggtacatccccttttggtgaggctacctcgtgtacataggcacatccctggccaaggggctacctctatgtatcacgggccatctcatcctctatcatcatacacttgcctgggcaggcttcttctgtggatatgggcacatctccacgtgggaggctacctccatatcacaggctcatctgtcaccaggtctttctcaatctcaaatcatctatcctactacaataggatatccatcaaacacaagtcatctatcctaccacaataggatatcaatcagtcagagcatgcattctcaagtttcatatctaatcaagcatgctaccattcaacatatcaattccctttctcagggatcatataaccaatcaacagctcatggccacacataaaatcacccatctctgggtttgattcacatatcaagcatcagtcaccctttcacagnnnnnnnnnnnnnnnnnnnnnnnnnnnnnnnnnnnnnnnnnnnnnnnnnnnnnnnnnnnnnnnnnnnnnnnnnnnnnnnnnnnnnnnnnnnnnnnnnnnnnnnnnnnnnnnnnnnnnnnnnnnnnnnnnnntacaatggcctgaatccaacttctcataatcataagtctaaaccgatcaaactcatctatataggctcatgagcaactttgtcaactgctctaaggtccagactagtcaaatagtcgaccttttatctctgctcatgcagactcagagccaaaaccaaacttcatcagtaatgatgattcaaggctctaaacttctcagaacagctttctgagcataagactctacagagtctgagcctaagaacggttctaacacctccaaaacacccctcaagataaccccaaaaccccgaaatccaaaacacagaaccaacggttagagctcgagtttcttacctctgtgatgctcagaagcaccagggaatcactttccctcggactactcgctcgatctaggcctctttcgcctttgggtctcaagctctcaggggttctctctgagaaatctgatctcactataactcagcttttctcaagaatcaatcggggtaacttactgatctcgaggtgctgatcattttctcagttgggtcggaggtgtttagatggaatatggagaagatatggagctctcaagacgcatcaatggcgattttctctctcttctttctttttcctttctctttctccctcagccccttttatagccacaaaaccgtcgatcccacgcatctcgcgccactattccacgcgactcgcgccactcattctggccttccacgcgactcgcgtggaatccaagtgactcgcgtggtatacatatggcgcgcgtcgcgccacatcccaagtgggtcgcgccgcctggcagaaactgcctatttccctctgaataccctcaagcatgttcattatccttaatcatggccttaatctaggcttaatcacatgcttaaaatatcaggcattacattttgatcaactttgcatgtgtttatgtttcttatctttaggaactagagaataggatcaagcctatggtagtgctagagttgtggtggattgagagatcataatacccagacacttgagagatgagtgaataattaccttagtgaagggtatgcaagttagacttcaatgtttgatggatttgaaaatctttgtctcaagttttgaatggttcagttatttgtagcattttaagctcaaggattgttttgtcaatgttgattctagagaattgatccatgcttcctacttgaactttgtttattgctgaggacagcaatatttaaatctgggaattgtttgatatgcgcctagcatatatggttttcctaagctttttagagcaagaattgagcattaagcatggataattgcccattttgtgttgtgaattgagctaatgtgataaattgccaggaaagtaaccacaggtgccaagactaagcaaaaattagaagaaaagtgcccagagcgccaaattcgcgccagaagcgccatttattctggaagctggcgccaggagcgtcacagccacgccaggggcgccacaagctctgatactcagcgccaggagcgccagcatggcgcctggagcgctatcttctctggacttcagcgcttggagcgccagttgccgcgccaagagcgccaaactctctatcagccagcgccttgggctccatgttggcgccaggagcaccatcccttctggatgttggcgccatcagcgccagactcgcgctaagggcaccacagatcgacagaagcagaattttaagggcaaaacagagacttcacaagctccagtataaatacttcaaccctcagcattgaatgcacgaactcttggagggaaacaacactaaatagggttttaggaagcttgggtgccttagctagggtttagggagagtgaagattcaagtggaggattctccatcttcttcttccttgcttcagctaggtatgccattttattttgcaacacagccacccattatgaggtttggctagttccttattgtagttaggtctaagcactgaatataacctcttttaggattgtattggatgctatctttcattaatatcaagttatttcactttatcttgttgaatgcatgtttctatctctctggaactgatcactctagttaggtactaagagctggggtttacaataggaatattggagctctatgcttggacttgggtaaagtgacaagctttacattaactagggataggagtgtatgcttgcaaccatttaatgcatcatttaatgcttgacctaaccaatatcactaagggattagggtattaaagtgggttaaagggttaagaacactacgggagtagggcttagctatcattgcatgaagatgcatgtttgagtaacttgggcttgatgagggtagtagacaatacatgcacaagggtagggagcattcagtgcttagccctaactacaataaggaactagccaaacctcataatgggtggctgtgttacaaaatcatatggcatacctagctgaagcaaggaagaagaagatggagaatcctccacttgaaccttcactctccctaaaccctagctaaggcacccaagcttcctaaaaccctatttagtgctgtttccctccaagagttcgtgcattcaatgctgagggttgaagtatttatactggagcttgtgaagtctctgttttgcccttaaaattctgcttctgtcgacctgtggcgcccttggcacgagtctggcgttgatggtgccaacatccagaagggatggcgctcctggcgccaacatggcgctcctggcgccaacatggcgcccaaggcgctggctgacagagagtttggcactcttggcacggcaactggcgctcttggcgcggcaactggcgctccaggcgctgaagtccagagaagatagcgctccaggcgccatgctggtgctcctggcgctgagtatcagagcttgtggcacccctggcatggctgtgacgctcctggcgccagcttccagaataaatggcgcttctggcgcggatttggcactctgggtgccaacctccagtgcttatggcgctcctggcgccacagctagcgctgatggcgccatagctttcttcagacttggctcttttcttctgatttttgcttagtcttggcacctatggttactttcctggcaatttatcacattagctcaattcacaacacaaaatgggcaattatccatgcttaatgctcaattcttgctctaaaaagtttaggaaaaccatatatgctaggcgcatatcaaacaattcccagatttaaatattgctgtcctcagcagtaaacaaagttcaagtaggaagcgtggatcaattctctagaatcaacattgacaaaacaatccctgagcttaaaatgctacaaataactgaaccattcaaaacttgagacaaagattttcaaatccatcaaacattgaagtctaacttgcatacccctcactaaggtaattattcactcatctctcaagtgtctgggtattatgatctctcaatccaccacagctctagcactaccataggcttgatcctattctctagttcctatagataagaaacataaacacatgcaaagttgatcaaaaggtcttgatatggttgtaacttggcctggctcaatgggtgggagaattttggacagtagctaagaatcattgagattgaaccctgctaaattcaggtacattcaattcgaaactggtttttcattccattactccctttttatcattttcttttctcttcctttcttctttttcttaacattgctttttctttttgttcattatcggcttcacttgaagactatcctttaaattttcaacccttaagtttctaatggaattcaccttgctttttatatgcttttctttctgaaccactcagctgtccaatctcaattaaggtagaggaatttaagtggttaatgtattatgtcaggtgattgaacaaaaaggtctcaagctcaaggggctagcaatggtaaaaattcaaggaagtctatttggccctgactaaatagaacaaaatgcctttatcacatcaacttatgcatgcatcagagagaaatggatcaagttctagtgtactatcacagtgaggcatccctcaaaagaaattaactatataagcacaatcctcactggctatggtatcaagctagactcatgatgatatcagatcaaacattgtttccatttcaaatgaattcagctatacaagcattcacacactcagttcaagtttcatacaacatcaagtcatgtttcatatcaccaatgctttccaaaatcaatttcacaagcgattgatccaacaaatctaaatccgggacaagcatgcctttagcaaaaatgtctaatatgtacacctatggttaggttaaaattagacgcaaaattaattgtagttaactgtttgtatagcttcacaaaaataaattttgttatcaaaaagtatctaaccaaaaagtatctgcctactatttgtgtttcactaaaacgacgcatgattaataaaaagacgcgtgtttcctcgattaacgtgcccctattcccagatttaaacccttttactttccccagcaaatgagacgcagaaaacacacaacagacaacacgttataagaggaaacatctcatgcataaacaaaatatcactactggcagaaatgtactgtgtttaggcacgcactgacggtgctacattgtgtaaatgtaaagtactgaatgtaaagtgcaaaaaacgtaaatgacatgaaaataaagcataaaataaacagagagagatagagtgaggaagatcagtgagtctgatcctcatccatggtgtctagagcatctgctgtgggcgaaggtggagcatctggtgatggcagtgcaaatgcaagtggaggtggctgtgatggcgagctggtgggatccacagagaaatgctggcagagagcagtaagcatcctcgtctgagcgtccatctgctcctgcatcctctgtgtaatggtagcctgctggtctagctgctgctggatcctcatggtagtggcggtgagctgagctatctgctgctgcatccgcacataagtgatggagtcctcacaaatgggctccctgtgatgagtctggctggatgcagcaggtgtgtcctgtggtggtgatgggtgagaggaagctgctggctgctgaggcgggcgaggtgactgggctgcctgctgatgaaggtcttggacctctggcatgggagcctccaatccctctcgcggtccgtatctcgggctccgggtagccatctcctcggcggtgagatcagtagctcggatgagctgatcctgaagagtgcgcctcaccgaatcctggtagaccctctgtgtcagcgtagtcccgagtggcacatctaggagctcttcgtcaggaatctccaggcccgcgtgtctgcagaggtgagagatgagtgaggagtgagcaaggagggacctagggctgccgtcctgaatcatgtgcaggatacggtcagataaagcataagagatatcaaggttgatatctctctgcaggacgtatagtaagcaagccctctccacattcatgtccatcaagttagaagacagaagaatggtggagttcacgaacagatgccagaagtctgactctgcgtgcagctcgtttcttctgagcttctcgggcacataatcaaagcctatcttcatccaccaagcggagaagcgcccggtgatgcctcggcggagctcgtccaccagctgaggcatgtcgtccctataagtagccttgcccgttcaaggatagggctgcatcctgttaaatcactgcacgaatccgcagcgttggaggccgtcgtgggaggtccggaggaagctctcaatgaacttgtggtcgaatgggacgaccacgcctcgcacccagctgcgtctctgctcgaccactgtcgactggtccacgttcgccaggaactccttcaatatagagctggagctcggctcagcaaagctcaccagtgtctgccactggcggcgctcgatgacctcccggatgaggaagtcttctggtaagtcctcccagtctataatcctcttttggataatcttcttaaggaggtaccatttgtcgaagcgctcttggttctccttggacaagaagcggccatcatcgtagtctaaggttcgaggcctcttgctggtggttcctgcagtgactttcttctttcctgtgtccacctgtttaccctaaaattgaaaaccaaaagcccatacaccacatgttcaacagttagccaaacagatcaggcctaatcagtggatcatggaaattcccaaatttggaataaagcatatcagacagcatagtatcaaggaaagcacagggcaaaaccaacagataacacttatgcatactcagaccaaggttgggattcccagatttagctgaaatcaaatggttacaaaagggtgcatagcatgctcaatgatagcaattatgaactcacaaataagggaccaaggtgactggggacatgaatttcaagtgcaggatatgatcaattcaacaatactcacaccagtatcacagcaggaaaacaatgccccaaatatgtttgaacacatggttaacaataatggttacctatatgcttcatgagttcaatcattcattcaaacaaagtggttgcagagagtcaagcagatttacaacacataatcaccaccaaaattgctaacaccaagctgagtgtcaatacagtctatagatacaaattcatagcatgctagtgactatgaatgcatggtgattaattaattgtgagttggaatgtcatggactaaagggcagaattataattgagcgcaattcccagatttgagttgggcaatatgcttatgcaaggaattaggttcagctcaatacaaatcagaccacgtcacaatgcactagcagttaaaacattcaaaactactgaagcatcgcaagagaacaaatcatttgaacagcctaatttagacacaaggtcctgattgtatacatgctttagaatcagttcaattgaaagaaaagcagtgcttggtacacaatggaattccttgttttatgctcatcaagggatttatgaattgactattctcaatcccagaaattgcaaaacacaggcaaccaataaattcagaggataatgcagaacaagcattacagacgcagctgaacaccaaaggtttacaccaattggttctcctctgtagatgtaggcataccaaattcaaaatcagaaccagcgcatataataggttgaacaaaggatggggtagggaagtgtatgcaggtttaacacaaactcagaacattgcacaaggcaagtatagctaacacaatcaccacagacctagtcttacccaagatgcagatagatggcctttcatttaagcacaaacgaatcacacctaacccttgctaatttaggatcacaaccatcacacgggaataagaaaatgaaaattggtccagtttcgacagggattagcaatggtacacatcagaatgttagtcaaaacaaggttatgaaacaattgacagctcgatgtccagtaccactcagaagttgattcacacaaaatgcccatgcagatgccttaccatgagtaatcaaataacaaacacccaacaatcttgctaatggcagcatatttaacaagtgctcagtgagttcagaggtgatttaacactgcatattgtgaatgacagttcataccaaccaatgaccaattgaagccaatgcaaaagaagatgcattcaatcaagatcgattcagcataaaagcaggtgataaccaaaggtcaggtagaaaatgagtcaatcgagcatacaagcagtcaccattaatgaaaaagataaccctaatgctgcgaagatggtgattactccttagactaactacaagttctgtaaaagcacccacagggtggagcaagagcacttaccttgtctcgtgccatgagaagagatatggaatgcaatcaccacaccaaatgagttgcaatgtcgatgcgaagagagcaggaaaagagtgagagagatagtgagggcgtgagtgatggggttaaggtgcggaaatggtggggaaaagcagaggtgaggtcgggaagcttgagagaatgagggagaatgagaagagttataaaatttaaacttaaaaacaatgccctaagtgcggcgccatccgcgccgccgccgcgtcaagagcgcagattcacaggagcaatggcgctaagagcgccacctcgcgccaagggcgcgaccagctagagagattggcgctccaggcgccagaaccacgcccccaacgccataagatgaaattgaaacccagccagcgccactggcgccatcctcgcaccaagagcgcggaaatccagatagcttggcgctccaggcgccatatccacgctggcggtgccatgtgagaattgaagggccagccagcgccattggcgccacactggcaccaagagcgtggaaatccagaaggcgccacattggcacgatcagcgcggagctccagataggctggcgctccaggcgccaagttggcgctcatggcgccacacaccttgcaaattcataacatgcagaaaatggcttttaagttcaagaacaccatgaagcttacaccaaaagtaaaaatgaagttataaataacatacatttatgagaaacatcaacaagagcaacgataatattaaaggaatgaatgtggacaagtacacaaaagctaatgtaatctatcaacaataaatgcacagctactgatctacttctaacctaagaacagactaaacataacactaacacacaattgagttgcctctcaataagcgcttgtttaacgtcacgagtctgacggttaatcctctaaggattaggggagctcaaagggattgcaacagcatccctatcaatttgacctccaaaatatggcttcagccgccatccattgaccttgaaaggtctgttggtgtcaagaggagagatttccacagtcccataaggaaaaacctttaccactacaaatggaccagaccatctagatttgagtttacctggaaacaaccgcaagcgcgagttgtacaataatacctgttggcctggggtaaactccttggaatggatgtgcttgtcatgccatttcttggttttctccttgtataaccttgcattctcatatgcagccattctgaattcgtctagctcattcaactgcaacaaacgcttctctgtagccttggatagctcaaagttgaggaactttatggcccacatagctttatgctccaattctaccggaagatgacatgacttcccatacaccaactgatatggtgacatacctattggtgtcttaaaagctgtccggtaggcccacaaagcatcgtctaacttcttggaccagtccttcctagaacttccaacggtcttctcaagtatccgcttcaattctctgttagagacttctactcgaccgttggtttgtgggtgatagggcgtggccaccttgtgggttaccccatacttagtgagcaagctctcaatttgcttgttgcagaagtgtgtgcctccatcactgaattatgactctgggaaccccaaaacgcgtgaagatgttctttctcaggaagtttgcaactactctggcatcattggtgggcaatgccaccgcttccacccattttgagacgtaatcaactgctactaggatatattgattggagaaagagttgggaaagggtcctatgaagtctctgtcccaaacatcaaacaattccacttccaagatgctgttgagtggcatttcatctctacgagagatattacccgtcctttggcatctatcacagttatccacaaatgccttagcatccttgaataaggtaggccaataatatccactttgtagcaccttgtgggcagtgcgattgcctccaaaatgacctccatagcttgaggcatggcagtgccagagaatcttcggaacatcaaactccgctacacacctacggataatgccatcagcacattgaaagtacaggaatggattatcccagtgatatcttcgggcatcatgcatgaacttcttcctttgctgccaggtaaagttttatggaactgcccccacagctttataattagccatatcagcaaaccaaggagcattggtgatagccatcatttgctcatctggaaatgactcattaatttccaattcaggcccatcttgtagatttgtagcttgaatccttgataaatggtctgctactttgttctctaccccagccttatctcttatctctagatcaaactcttggaataagagcatccaacgcagcaagcgtggcttagcatcctgctttgtcaataaatacttaagagcagcatggtcagtgaaaacaataactttagacccaatcaagtaaggcctaaacttgtccaatgcatataccacagctagcatttctttttcagttgtggcatagttaatctgtgcctcatttaaaaccttgctagcataatatataacatgtaaaagtttatccttacgttgtccaaggacagccccaatggcacaagtgcttgcatctagttccaatcaggggctgtgagaactggtgcagttgtaagcttttccttcaacacattaaatgcgctgaggtaagcttcatcaaagacaaaagtagattcttttgtcaatagttggctaagaggtctagcaatcttagaaaaatccttaatgaacctcctataaaagccagcgtggcccaagaagctacgcacactattaacatttgtgggaggaggcaatttttctatcaacataagtttggtctcatctacctcaattccttttgaggagattttgtggcccaaaactatgccatcttgtaccatgaaatggcatttctctaaatttaaaacaaggtttgtttcttgacatctttgcaaaactttagatagattggataaacaagcatcaaagcaagaaccaacactactagaaaagcagctttcaacatcggttatttgagacatttaacatcggttctgggccgatgttgaatcagccgacgttgaaagttgataatttaacatcggttccgaaaaccgatgttaacatatatgaagtacatcgggttgccatcagtaaccgatgtggacatgtcttatatgaaaatcctcaaaagaataaacgatggtttgacaacatcggttttgtcgtagaaccgatgttaacatgtaaatcaacatcggttttcaatgtaaaccgatgttgtttattcataacaacatcggttttatatagtaaaccgatgttgtttgttgataannnnnnnnnnnnnnnnnnnnnnnnnnnnnnnnnnnnnnnnnnnnnnnnnnnnnnnnnnnnnnnnnnnnnnnnnnnnnnnnnnnnnnnnnnnnnnnnnnnnnnnnnnnnnnnnnnnnnnnnnnnnnnnnnnnnnnnnnnnnnnnnnnnnnnnnnnnnnnnnnnnnnnnnnnnnnnnnnnnnnnnnnnnnnnnnnnnnnnnnnnnnnnnnnnnnnnnnnnnnnnnnnnnnnnnnnnnnnnnnnnnnnnnnnnnnnnnnnnnnnnnnnnnnnnnnnnnnnnnnnnnnnnnnnnnnnnnnnnnnnnnnnnnnnnnnnnnnnnnnnnnnnnnnnnnnnnnnnnnnnnnnnnnnnnnnnnnnnnnnnnnnnnnnnnnnnnnnnnnnnnnnnnnnnnnnnnnnnnnnnnnnnnnnnnnnnnnnnnnnnnnnnnnnnnnnnnnnnnnnnnnnnnnnnnnnnnnnnnnnnnnnnnnnnnnnnnnnnnnnnnnnnnnnnnnnnnnnnnnnnnnnnnnnnnnnnnnnnnnnnnnnnnnnnnnnnnnnnnnnnnnnnnnnnnnnnnnnnnnnnnnnnnnnnnnnnnnnnnnnnnnnnnnnnnnnnnnnnnnnnnnnnnnnnnnnnnnnnnnnnnnnnnnnnnnnnnnnnnnnnnnnnnnnnnnnnnnnnnnnnnnnnnnnnnnnnnnnnnnnnnnnnnnnnnnnnnnnnnnnnnnnnnnnnnnnnnnnnnnnnnnnnnnnnnnnnnnnnnnnnnnnnnnnnnnnnnnnnnnnnnnnnnnnnnnnnnnnnnnnnnnnnnnnnnnnnnnnnnnnnnnnnnnnnnnnnnnnnnnnnnnnnnnnnnnnnnnnnnnnnnnnnnnnnnnnnnnnnnnnnnnnnnnnnnnnnnnnnnnnnnnnnnnnnnnnnnnnnnnnnnnnnnnnnnnnnnnnnnnnnnnnnnnnnnnnnnnnnnnnnnnnnnnnnnnnnnnnnnnnnnnnnnnnnnnnnnnnnnnnnnnnnnnnnnnnnnnnnnnnnnnnnnnnnnnnnnnnnnnnnnnnnnnnnnnnnnnnnnnnnnnnnnnnnnnnnnnnnnnnnnnnnnnnnnnnnnnnnnnnnnnnnnnnnnnnnnnnnnnnnnnnnnnnnnnnnnnnnnnnnnnnnnnnnnnnnnnnnnnnnnnnnnnnnnnnnnnnnnnnnnnnnnnnnnnnnnnnnnnnnnnnnnnnnnnnnnnnnnnnnnnnnnnnnnnnnnnnnnnnnnnnnnnnnnnnnnnnnnnnnnnnnnnnnnnnnnnnnnnnnnnnnnnnnnnnnnnnnnnnnnnnnnnnnnnnnnnnnnnnnnnnnnnnnnnnnnnnnnnnnnnnnnnnnnnnnnnnnnnnnnnnnnnnnnnnnnnnnnnnnnnnnnnnnnnnnnnnnnnnnnnnnnnnnnnnnnnnnnnnnnnnnnnnnnnnnnnnnnnnnnnnnnnnnnnnnnnnnnnnnnnnnnnnnnnnnnnnnnnnnnnnnnnnnnnnnnnnnnnnnnnnnnnnnnnnnnnnnnnnnnnnnnnnnnnnnnnnnnnnnnnnnnnnnnnnnnnnnnnnnnnnnnnnnnnnnnnnnnnnnnnnnnnnnnnnnnnnnnnnnnnnnnnnnnnnnnnnnnnnnnnnnnnnnnnnnnnnnnnnnnnnnnnnnnnnnnnnnnnnnnnnnnnnnnnnnnnnnnnnnnnnnnnnnnnnnnnnnnnnnnnnnnnnnnnnnnnnnnnnnnnnnnnnnnnnnnnnnnnnnnnnnnnnnnnnnnnnnnnnnnnnnnnnnnnnnnnnnnnnnnnnnnnnnnnnnnnnnnnnnnnnnnnnnnnnnnnnnnnnnnnnnnnnnnnnnnnnnnnnnnnnnnnnnnnnnnnnnnnnnnnnnnnnnnnnnnnnnnnnnnnnnnnnnnnnnnnnnnnnnnnnnnnnnnnnnnnnnnnnnnnnnnnnnnnnnnnnnnnnnnnnnnnnnnnnnnnnnnnnnnnnnnnnnnnnnnnnnnnnnnnnnnnnnnnnnnnnnnnnnnnnnnnnnnnnnnnnnnnnnnnnnnnnnnnnnnnnnnnnnnnnnnnnnnnnnnnnnnnnnnnnnnnnnnnnnnnnnnnnnnnnnnnnnnnnnnnnnnnnnnnnnnnnnnnnnnnnnnnnnnnnnnnnnnnnnnnnnnnnnnnnnnnnnnnnnnnnnnnnnnnnnnnnnnnnnnnnnnnnnnnnnnnnnnnnnnnnnnnnnnnnnnnnnnnnnnnnnnnnnnnnnnnnnnnnnnnnnnnnnnnnnnnnnnnnnnnnnnnnnnnnnnnnnnnnnnnnnnnnnnnnnnnnnnnnnnnnnnnnnnnnnnnnnnnnnnnnnnnnnnnnnnnnnnnnnnnnnnnnnnnnnnnnnnnnnnnnnnnnnnnnnnnnnnnnnnnnnnnnnnnnnnnnnnnnnnnnnnnnnnnnnnnnnnnnnnnnnnnnnnnnnnnnnnnnnnnnnnnnnnnnnnnnnnnnnnnnnnnnnnnnnnnnnnnnnnnnnnnnnnnnnnnnnnnnnnnnnnnnnnnnnnnnnnnnnnnnnnnnnnnnnnnnnnnnnnnnnnnnnnnnnnnnnnnnnnnnnnnnnnnnnnnnnnnnnnnnnnnnnnnnnnnnnnnnnnnnnnnnnnnnnnnnnnnnnnnnnnnnnnnnnnnnnnnnnnnnnnnnnnnnnnnnnnnnnnnnnnnnnnnnnnnnnnnnnnnnnnnnnnnnnnnnnnnnnnnnnnnnnnnnnnnnnnnnnnnnnnnnnnnnnnnnnnnnnnnnnnnnnnnnnnnnnnnnnnnnnnnnnnnnnnnnnnnnnnnnnnnnnnnnnnnnnnnnnnnnnnnnnnnnnnnnnnnnnnnnnnnnnnnnnnnnnnnnnnnnnnnnnnnnnnnnnnnnnnnnnnnnnnnnnnnnnnnnnnnnnnnnnnnnnnnnnnnnnnnnnnnnnnnnnnnnnnnnnnnnnnnnnnnnnnnnnnnnnnnnnnnnnnnnnnnnnnnnnnnnnnnnnnnnnnnnnnnnnnnnnnnnnnnnnnnnnnnnnnnnnnnnnnnnnnnnnnnnnnnnnnnnnnnnnnnnnnnnnnnnnnnnnnnnnnnnnnnnnnnnnnnnnnnnnnnnnnnnnnnnnnnnnnnnnnnnnnnnnnnnnnnnnnnnnnnnnnnnnnnnnnnnnnnnnnnnnnnnnnnnnnnnnnnnnnnnnnnnnnnnnnnnnnnnnnnnnnnnnnnnnnnnnnnnnnnnnnnnnnnnnnnnnnnnnnnnnnnnnnnnnnnnnnnnnnnnnnnnnnnnnnnnnnnnnnnnnnnnnnnnnnnnnnnnnnnnnnnnnnnnnnnnnnnnnnnnnnnnnnnnnnnnnnnnnnnnnnnnnnnnnnnnnnnnnnnnnnnnnnnnnnnnnnnnnnnnnnnnnnnnnnnnnnnnnnnnnnnnnnnnnnnnnnnnnnnnnnnnnnnnnnnnnnnnnnnnnnnnnnnnnnnnnnnnnnnnnnnnnnnnnnnnnnnnnnnnnnnnnnnnnnnnnnnnnnnnnnnnnnnnnnnnnnnnnnnnnnnnnnnnnnnnnnnnnnnnnnnnnnnnnnnnnnnnnnnnnnnnnnnnnnnnnnnnnnnnnnnnnnnnnnnnnnnnnnnnnnnnnnnnnnnnnnnnnnnnnnnnnnnnnnnnnnnnnnnnnnnnnnnnnnnnnnnnnnnnnnnnnnnnnnnnnnnnnnnnnnnnnnnnnnnnnnnnnnnnnnnnnnnnnnnnnnnnnnnnnnnnnnnnnnnnnnnnnnnnnnnnnnnnnnnnnnnnnnnnnnnnnnnnnnnnnnnnnnnnnnnnnnnnnnnnnnnnnnnnnnnnnnnnnnnnnnnnnnnnnnnnnnnnnnnnnnnnnnnnnnnnnnnnnnnnnnnnnnnnnnnnnnnnnnnnnnnnnnnnnnnnnnnnnnnnnnnnnnnnnnnnnnnnnnnnnnnnnnnnnnnnnnnnnnnnnnnnnnnnnnnnnnnnnnnnnnnnnnnnnnnnnnnnnnnnnnnnnnnnnnnnnnnnnnnnnnnnnnnnnnnnnnnnnnnnnnnnnnnnnnnnnnnnnnnnnnnnnnnnnnnnnnnnnnnnnnnnnnnnnnnnnnnnnnnnnnnnnnnnnnnnnnnnnnnnnnnnnnnnnnnnnnnnnnnnnnnnnnnnnnnnnnnnnnnnnnnnnnnnnnnnnnnnnnnnnnnnnnnnnnnnnnnnnnnnnnnnnnnnnnnnnnnnnnnnnnnnnnnnnnnnnnnnnnnnnnnnnnnnnnnnnnnnnnnnnnnnnnnnnnnnnnnnnnnnnnnnnnnnnnnnnnnnnnnnnnnnnnnnnnnnnnnnnnnnnnnnnnnnnnnnnnnnnnnnnnnnnnnnnnnnnnnnnnnnnnnnnnnnnnnnnnnnnnnnnnnnnnnnnnnnnnnnnnnnnnnnnnnnnnnnnnnnnnnnnnnnnnnnnnnnnnnnnnnnnnnnnnnnnnnnnnnnnnnnnnnnnnnnnnnnnnnnnnnnnnnnnnnnnnnnnnnnnnnnnnnnnnnnnnnnnnnnnnnnnnnnnnnnnnnnnnnnnnnnnnnnnnnnnnnnnnnnnnnnnnnnnnnnnnnnnnnnnnnnnnnnnnnnnnnnnnnnnnnnnnnnnnnnnnnnnnnnnnnnnnnnnnnnnnnnnnnnnnnnnnnnnnnnnnnnnnnnnnnnnnnnnnnnnnnnnnnnnnnnnnnnnnnnnnnnnnnnnnnnnnnnnnnnnnnnnnnnnnnnnnnnnnnnnnnnnnnnnnnnnnnnnnnnnnnnnnnnnnnnnnnnnnnnnnnnnnnnnnnnnnnnnnnnnnnnnnnnnnnnnnnnnnnnnnnnnnnnnnnnnnnnnnnnnnnnnnnnnnnnnnnnnnnnnnnnnnnnnnnnnnnnnnnnnnnnnnnnnnnnnnnnnnnnnnnnnnnnnnnnnnnnnnnnnnnnnnnnnnnnnnnnnnnnnnnnnnnnnnnnnnnnnnnnnnnnnnnnnnnnnnnnnnnnnnnnnnnnnnnnnnnnnnnnnnnnnnnnnnnnnnnnnnnnnnnnnnnnnnnnnnnnnnnnnnnnnnnnnnnnnnnnnnnnnnnnnnnnnnnnnnnnnnnnnnnnnnnnnnnnnnnnnnnnnnnnnnnnnnnnnnnnnnnnnnnnnnnnnnnnnnnnnnnnnnnnnnnnnnnnnnnnnnnnnnnnnnnnnnnnnnnnnnnnnnnnnnnnnnnnnnnnnnnnnnnnnnnnnnnnnnnnnnnnnnnnnnnnnnnnnnnnnnnnnnnnnnnnnnnnnnnnnnnnnnnnnnnnnnnnnnnnnnnnnnnnnnnnnnnnnnnnnnnnnnnnnnnnnnnnnnnnnnnnnnnnnnnnnnnnnnnnnnnnnnnnnnnnnnnnnnnnnnnnnnnnnnnnnnnnnnnnnnnnnnnnnnnnnnnnnnnnnnnnnnnnnnnnnnnnnnnnnnnnnnnnnnnnnnnnnnnnnnnnnnnnnnnnnnnnnnnnnnnnnnnnnnnnnnnnnnnnnnnnnnnnnnnnnnnnnnnnnnnnnnnnnnnnnnnnnnnnnnnnnnnnnnnnnnnnnnnnnnnnnnnnnnnnnnnnnnnnnnnnnnnnnnnnnnnnnnnnnnnnnnnnnnnnnnnnnnnnnnnnnnnnnnnnnnnnnnnnnnnnnnnnnnnnnnnnnnnnnnnnnnnnnnnnnnnnnnnnnnnnnnnnnnnnnnnnnnnnnnnnnnnnnnnnnnnnnnnnnnnnnnnnnnnnnnnnnnnnnnnnnnnnnnnnnnnnnnnnnnnnnnnnnnnnnnnnnnnnnnnnnnnnnnnnnnnnnnnnnnnnnnnnnnnnnnnnnnnnnnnnnnnnnnnnnnnnnnnnnnnnnnnnnnnnnnnnnnnnnnnnnnnnnnnnnnnnnnnnnnnnnnnnnnnnnnnnnnnnnnnnnnnnnnnnnnnnnnnnnnnnnnnnnnnnnnnnnnnnnnnnnnnnnnnnnnnnnnnnnnnnnnnnnnnnnnnnnnnnnnnnnnnnnnnnnnnnnnnnnnnnnnnnnnnnnnnnnnnnnnnnnnnnnnnnnnnnnnnnnnnnnnnnnnnnnnnnnnnnnnnnnnnnnnnnnnnnnnnnnnnnnnnnnnnnnnnnnnnnnnnnnnnnnnnnnnnnnnnnnnnnnnnnnnnnnnnnnnnnnnnnnnnnnnnnnnnnnnnnnnnnnnnnnnnnnnnnnnnnnnnnnnnnnnnnnnnnnnnnnnnnnnnnnnnnnnnnnnnnnnnnnnnnnnnnnnnnnnnnnnnnnnnnnnnnnnnnnnnnnnnnnnnnnnnnnnnnnnnnnnnnnnnnnnnnnnnnnnnnnnnnnnnnnnnnnnnnnnnnnnnnnnnnnnnnnnnnnnnnnnnnnnnnnnnnnnnnnnnnnnnnnnnnnnnnnnnnnnnnnnnnnnnnnnnnnnnnnnnnnnnnnnnnnnnnnnnnnnnnnnnnnnnnnnnnnnnnnnnnnnnnnnnnnnnnnnnnnnnnnnnnnnnnnnnnnnnnnnnnnnnnnnnnnnnnnnnnnnnnnnnnnnnnnnnnnnnnnnnnnnnnnnnnnnnnnnnnnnnnnnnnnnnnnnnnnnnnnnnnnnnnnnnnnnnnnnnnnnnnnnnnnnnnnnnnnnnnnnnnnnnnnnnnnnnnnnnnnnnnnnnnnnnnnnnnnnnnnnnnnnnnnnnnnnnnnnnnnnnnnnnnnnnnnnnnnnnnnnnnnnnnnnnnnnnnnnnnnnnnnnnnnnnnnnnnnnnnnnnnnnnnnnnnnnnnnnnnnnnnnnnnnnnnnnnnnnnnnnnnnnnnnnnnnnnnnnnnnnnnnnnnnnnnnnnnnnnnnnnnnnnnnnnnnnnnnnnnnnnnnnnnnnnnnnnnnnnnnnnnnnnnnnnnnnnnnnnnnnnnnnnnnnnnnnnnnnnnnnnnnnnnnnnnnnnnnnnnnnnnnnnnnnnnnnnnnnnnnnnnnnnnnnnnnnnnnnnnnnnnnnnnnnnnnnnnnnnnnnnnnnnnnnnnnnnnnnnnnnnnnnnnnnnnnnnnnnnnnnnnnnnnnnnnnnnnnnnnnnnnnnnnnnnnnnnnnnnnnnnnnnnnnnnnnnnnnnnnnnnnnnnnnnnnnnnnnnnnnnnnnnnnnnnnnnnnnnnnnnnnnnnnnnnnnnnnnnnnnnnnnnnnnnnnnnnnnnnnnnnnnnnnnnnnnnnnnnnnnnnnnnnnnnnnnnnnnnnnnnnnnnnnnnnnnnnnnnnnnnnnnnnnnnnnnnnnnnnnnnnnnnnnnnnnnnnnnnnnnnnnnnnnnnnnnnnnnnnnnnnnnnnnnnnnnnnnnnnnnnnnnnnnnnnnnnnnnnnnnnnnnnnnnnnnnnnnnnnnnnnnnnnnnnnnnnnnnnnnnnnnnnnnnnnnnnnnnnnnnnnnnnnnnnnnnnnnnnnnnnnnnnnnnnnnnnnnnnnnnnnnnnnnnnnnnnnnnnnnnnnnnnnnnnnnnnnnnnnnnnnnnnnnnnnnnnnnnnnnnnnnnnnnnnnnnnnnnnnnnnnnnnnnnnnnnnnnnnnnnnnnnnnnnnnnnnnnnnnnnnnnnnnnnnnnnnnnnnnnnnnnnnnnnnnnnnnnnnnnnnnnnnnnnnnnnnnnnnnnnnnnnnnnnnnnnnnnnnnnnnnnnnnnnnnnnnnnnnnnnnnnnnnnnnnnnnnnnnnnnnnnnnnnnnnnnnnnnnnnnnnnnnnnnnnnnnnnnnnnnnnnnnnnnnnnnnnnnnnnnnnnnnnnnnnnnnnnnnnnnnnnnnnnnnnnnnnnnnnnnnnnnnnnnnnnnnnnnnnnnnnnnnnnnnnnnnnnnnnnnnnnnnnnnnnnnnnnnnnnnnnnnnnnnnnnnnnnnnnnnnnnnnnnnnnnnnnnnnnnnnnnnnnnnnnnnnnnntaatcgatgcgacggttcattgtctaaggacaacatcggttcccatacaaaaaccgatgttaacatgtaattttaacatcagtttgcttaaaatcttgacaaccgatgttaacatttcatggttaacatcggttatacttaaaaatctacaaaaccgatgttaatatttcatggttaacatcggttttagttaaaaatctacaaaaccgatgttaatatttcatggttaacatcggttttagttaaaaatctacaaaaccgatgttaagagttcatatttaacatcggtttttcgtaaaatcttcaaaaccgatgttaaataagtccgcttatttacaaaattgccaccgcgttttcgttaacatcggttttctaaataaccgatgttaaactaccgatgttaaaacctatttttgtagtagtgcaaacacagaaaaatcgtccatgaacacctctaagaatttttcaaccatatcagagaaaatggataacatacacctttgaaaagttgcgggcgcattgcataaaccgaagggcatccttctgtaggcaaatactccaaatgggcaggtgaatgctgtcttctcttgatcttctggtgccacgggaatctgattatagccggagtatccatcaagaaaacaatagaaagcatggccggctaatctctccaacatctgatcaatgaaggggagtggaaaatgatctttcctggtggcgtcattaagtcttctataatcaacgcacatccgccaaccagtgatggttcgagtaggaatgaggtcattgttatcattttgaaccaccgtcactccacccttctttggaactgtctgcaccggctcacctaagcggtgtctgatatgggatagatcatcccagcatcaagaagtttcaccacttccttccggacaacctccttcatcataggattcaatcttctttgaggttgcctgacgggcttcacatcgtcctccattagaatcttatgtgtgcaaaatgaaggattgatacccttcaaatctgatatagaccatccaatggcggacttatgctccttgagcaccttgattaacttggcttcttcatcttcagacaagcttttgctaatgatcacagggtatgtctcatcttccccccaaaacacatattttagagctttaggcaactcttttaactccagctttggtgctccaacatcaatgtcagttgccttcttctccaaaacctccatgactgcttcttttaattcttcaatgacagccacatcttgagcctccataatctcttcaagttcttgctcaggagactcgtctgtgtgaatcaaggcatctagcacatcaatcctaaagcaatcattcttatcaagaggaaccttcatagcatcaaagacattgaatacaattgattcatcaaacatcctcaattctaattttccttcagccacatctatgatagctttagccgtagccaagaatggcctacctagaagaacagggatctccccctcttccatatccagaactataaagtcagctgggaaaatgaatttatccaccttgaccaaaatgtcttcaatgaacccactaggtcttctcaaggatctatcggccagttgcagagataccctggtaggtttcaactcagagatgcccaatgatttgcatattgaaaggggcatcaagtcgatacttgcaccaaggtcacataaagctttacccacattaacattacctatggcaataggtatgttaaaacttcctggatcccggagtttaggtgactctggattatggcaatgcattctttggttaagaccactgtctcacattcttgcaacttgtgctttttagataacaagtccttcataaacttggcataattggacatattagccaaggcttcagcaaaaggaatgttaacctgcagctttttaaacatttccaagaatttggcatattgctttttctgtgcttgctgcttcatcttcaaagggtatggtggcttttcaaatctgcaaaaatccagaggcttcttgggttcagctgagactttttccttctctttctcttgctcctttgagctgctagatggttcttctttctcaggttgtgcagcagctggtggaatctctttctcctcctcttctctatgcaccactttggtcttctccttaggagcaacgataattccactcctagtggtgatagctttggcatgttccctaggatttaccactgtatcgctagggaattgcccaggtgatctttctgctagttgctttgagatctggcctatctgagtctccagatttctgatggaagcaccttggttcttcaattgagacctagtctcgttcatgaagtcatcagtgttctggatatgatcgttagtggttttggccagctgcaacatagctttttccaactctgatggctctttgggagggatgggaggtggttgtaagtagtggttagacttgtagtccaacccacctccatgtggtcttcttggatagctactaccactcccagaagcttgattgtaatttctttgataaccttgtggtggcctttggtcataccatactccgttcacctgaattggatcggcccccaccaaggttggacagacattggactcgtggtccccttggcaatacacacatacaaccacgcctgctttgattgatgaagcttgagctttggagatctcaagcttgtcaatcttagcattgaggatggcgagctgctgtgataggagtttttgctcagccaacatagtgtctgtgctgcccaaatgaataacttccctctttggctgacttgcaatgctctcattctccgttctggccaaagagtctatcaagtcatgggtttgggctgctatctttgatctgatggattttccgactgctccgtttagtaccagctttgattccggtgacaaaccattaaagaagattcgcaccttcttcccaactggcatatcatattgagggcaccgccggattaactcttgaaaccgattccatgccgcacaaagtgtctctctatcgagctgtgtgaagttggtgatctcattcaccaggcgattatacttctccatagaaaaatattgagcaaagaatcttgccatcaactcatcccaggtggttatgctgttagaaggctgacggcctaaccatctgagtgccttccctttcagagcaaaaggaaagaggcggagccgaatagcatcatcggttactccttgatgacggatggtatcgcagatcatcataaagcggtcagcaaagtcgtgaggatcctcatcatcctcaccaccaaattgattcttctccaccaaactgataagggatgggtggatgtcgaagtgattagcttgaataggcggtctgacaatgctggaggctggtcggacgaacaatggagcaaggatattctccataagttcgtcctctggccttagctgctcatggtgttgttcagccatatctagttcctcttgtgattcttcttcttcttgcggtcgagaactagatacttctgcttccttcctctgcctcgctaacctccgattcctcctagcagttttcttgatctcgggatcaaactgaagattcgcagggttagcggtacctcgcataaactctggaagtaggtcagtaacaaaataaatccaaccttaaagataaaaatttataatgaatttggctaaaacaatccccgacaacggcgccaaaaacttgttgtggactcagcaagtataccggtcgtacaagtaataaagtgataagaaagatatcgtcccacgaggattgtttgaccaattaaattataaattaaatcaataagttggataacaaataaaatgaataaggttgttgttgtgtgtgtgtgtaaaataagctagattaaaacctaaatataaacatgaatatatggacaaactatggaggattataatgatgtatgtagttaagtagctagggcaatccacactaaatgttccctacccttgtgcatgtattgtctactaccctcatcaagcccaagttactcaaacatgcatcttcatgcaatgatagctaagccctactcccgtagtgttcttaaccctttaacccactttaataccctaatcccttagtgatattggttaggtcaagcattaaatgatgcattaaatggttgcaagcatacactcctatccctagttattgtaaagcttgtcactttacccaagtccaagcatagagccccaatattcctattgtaaaccccagctcttagtacctaactagagtgatcagttccagagagatagaaacatgcattcaacaagataaagtgaaataacttgatattaatgaaagatagcatccaatacaatcccaaaagaggttacattcagtgcttagccctaactacaataaggaactagccaaacctcataatgggtggttgtgttacaaaataaaatggcatacctagctgaagcaaggaagaagaagatggagaatcctccacttgaaccttcactctccctaaaccctagctaaggcacccaagcttcctaaaaccctatttagtgttgtttccctccaagagttcgtgcattcaatgctgagggttgaagtatttatagtggagcttgtgaagtctctgttttgcccttaaaatctgcttctgtcgacctgtggcgcccttggcacgagtctggcgctgatggcgccaacatccagaagggatggcgctcctggcgccaacatggcgcccaaggcgctggctgacagagagtttggcgctcttgacgcggcaattggcgctccaggcgctgaagtccagagaagatagcgctccaggcgccatgctggcgcttctggcgctgagtatcagagcttgtggcgcccctggcatggctgtgacgctcctggcgccagcttccggaataaatgacgcttctggcgcggatttggtgctctgggcgccaacctccagtgcttatggcgctcctagcgccacaactggcgctgatggcgccatagctttcttcagacttggctcttttcttctgatttttgcttagtcttggcacctgtggttactttcctgacaatttatcacattagctcaattcacaacacaaaatgggcaattgtccatgcttaatgctcaattcttgctctaaaaagcttaggaaaaccttatatgctaggcgcatatcaacacaaaataggagaaaggaaaactaactaattaatatgagacacacatgagagctttctgtttaagaaaagttaaattttgagaaaataattcacttgttttaatttattcatctacttatctttctcatgagatgtgtagggttcatttgattccattcattttgttaaggtaaaagacatcatattgcttgttcgttttttttttacctatttttgtatacaattagtttgataaatggaaggttaatccttaaggtaaaactaaagtccaccttcaattagttagatctaatagaccagaaaaattgatatcgtataaattagtgtatgaattgttctctgtatcatatttctaaaataaaagccttaagcttataatcaacatgctttataaattagttcaaaccatacaaattagttataaaattttactgtactcagctttataaatatcaacttcttaattatgtctacattattctgtcaaaaaataatcatgtctacctaatgatattatgagagttgatatgcctatatctatctttgcaatcatatctatacaaaaatgacaaattatgtgctttgttattacgtaataggtaggtttctaaatttctatcagttcaggagctagcagtctaatatttaaatacattaaatacataattaaagtgaattcttattctcttttgtcttgtgtcaacaatgtcattaattgagtgttgcaaattttctgatatcgaattctatttctatggataaaaaaatggtcatcagtgctacacctgtcaatgttggaaaattatgtaaagcacaatatgtgtctcagatatgtaaaaaaatttgaagcacttagttaattaaagaacagtttcacagttgaaatttaactcttcaaattttcaatcagaaaatggggtactatacataaaatgtaacttgagaaattacctacttacttttgtatttttctcaacttagagttggatttaatatgaatagaaaaatataaatttggaggatggagtgtgaaatgtgaataactctagcgagagagatgggctgcagatatttaagagggtcatttactttgtttttttttctttcttttaagtggtgagtgtgtaatttatttcttgtcttggtttatatatgctgacaatggaatgtgctgacattatttgggtttctatagcagtaacttgtacgtgtattatagttcaaataagtgagagaaaaactaatttggatgtgctaaaatagaaagggggttgctggacgtgagtgtaatttggtttgtatgcatataggagacaatgctgtgagacaaagtatcacaaataattttaaaagggttctcattttaaaagaatatacattttaacaatttagactacatatatagttagttcgtttttcatcctttctcttttatgattgcattgttctagagagtcttcaacaagcatataatgtgtataaccctgctttatgatgtgacacatgtttgattaaatttttttgttttgttttttataacagattaaaatttcttcttgtggtgtaacataatggatactgattttgaattcaaatgtatgtatttacattatctgcagtttataattatcagttgtagtttagcattaccaattgtggttgctactcaatatactattgaaaaaatcattttccacattgaaatttttggacatttaacatcaatttttaatcgatgttgaaactaccaacattaaaagtatcaaggttaatatcgatttaaaaaaaaaaaaaaannnnnnnnnnnnnnnnnnnnnnnnnnnnnnnnnnnnnnnnngatattggtttttataaaaaaaaacttatgttgttagtaaattaacagtggttataaaaaaatcgatgtagaaatgacaccttctacatcggtttttccaaaactgatgttgtatagtacttacagcatcgggtttgcctaaaaccaatttagaaattgtctttttcatatcgatttttcttataaccgatgttagagtcacttcctatgtcgtttattacataacagatgtagaatgtcattttttaaaaaaacatggcctagctattctctttgtttctctccttgtaatattaaaatacacattaaaagcttaaacaaaatttttagatatacatatgaatctattctatttatataattttagatgtatagaacacatagtaatgcatgaatgtaggtgtgtatgactagcatacccaaggcaatgctaaatggatgacccaagagttggcaccagatacccaacagtaatggtaaaatgactaaatgtaccttcaattgatcaattgtaccaacaaagctagctttcctaattgatagttttagtgcatttagaacctctatatttagtgatctaaactaaacacattctcagttgagactcaatttaaacgagttaacttttaaaacttagtcatagtctttgatccctattcaatgctttttcaacaataacatggtctttggtgcaatatttttcttttttattttttgggtactagcgcctattcaactttgtccattcatcaatatcctatcatcaatctcatccccatgtatgttgtctcttttttaaaaaagtttcttgtaataagtaatgtctattgtttccaatttatgttatgtttaggattgtcttgtgtgtattttaagagagggattcttttttcttttcaaaaatgtaaaaaatcaagcttttattttccgtgtagtagtatatgtgatttttgtgaatttccactcatatcaattaaatgtccagcttataggtagtataatattccatatttgttatgatatttaaaataataaaaaattctagacattattcattcctagaaagtagtttatattgtattttcctttgcaagacgaaggttgaagtcatatttgtcatgggaacatggaaagtaatttttcaacttaatcaaacttttactttatttttcattttaattttaaaagtattttagaaatatttatccaagaataacaatcctacttataatattcttgaaaatattatttttgagattatattattattattattattattattattattattattattattattattattattattattattattattattattattattattattattattatactatcaccttgcctagcaattccatttctaagtattctaaatgaattataaagtcaaaagatgcaaattatattataatagtacttaggctaccaaacgacatttagtgcaccttcggaatatttaggtgctattaagatggcaagttagtcacatgataaatggaaagcgaagctttccaatgccactcttcttcatttgttctcttctatcatactgctctagaactataggaaactgcataaccagacaaaaaaaaaaaaatgaggttctacataatcttgttaaaaaaaataattaaaaagtaaaatataaactaaccatgagatgtaaaaagccattacaagtgatacatgtgtctcttgttagaacatgatagcaaataagtattggctagtggctataaacttatgccaaattcaaatatggaatgacgatacaattgcagataaaaaagaacacattctcagcattcctgtttaaacttagcagtaaggactacccttgatgtaagcattaatcacaggttttattgccttctgtacttccgcaacaaattctggtaatgaaaaagaacttgtccatgaaatcaaaatttaagagaataaaataatttgattttttattgtcatagaagaaaatagataacacaagttcaagcataagcaactcgtacctatgcactgtcccagtccccacaacgttttcctcttgcaaggttagttactacagcagatcctaccactccccacaacgttttcctgttgcaaggttggttactacaatagatcttaccactgctgcatgactaccagaatatgctgcaaatattcaaatttgtgaatgtgacttttatatctaccaagtactaataaccacaatatataaaagcatggaactgaaattcattatgcaaacctttgatgaattcacgtgcttctttttcataatggggataaacacaaataattattctcttttctaattaatacttatcgaaattattgtttcatttactctttcaatatatactattaaaattaactgcattaataatttaattattttgttataactgaattttttaaattgccctccgccaactcacccttaatgtccccattatattagcaaataaatctttaattacaactccccctactttcttaaaccttgaaaggaagcacttatcttaagcactgagtttagtacagcaggtcatcaagaaatcctcttgctctaagaaatacaaaataatcctagacatccacacacaaccaagaatgaaaaaaactagaaaatattttttgcacctcacaagaggaataacaacataacggggaaagcagcaaccaattaattgagcaaaatgatgttgattgcacttattttgatgcttctaaaggttccgaaccttaaattatcccctgcattggttgattgagttgtgttcaccacttccttttgtctcttgttgcttaaaattcttactgcaataagagaatgaatgggaaggaattcttggagataaactgttttcctgtttatttggtattcaaacagcaaacaacacagagcaaagccagcaagagcacatcatcaccttcctatgatgcatcatctcttggcaaacgtgaaggaaatttgcactcatggagtcactgtcaaatgttgccgccacccgcctgcaatgtttcaaccatcacatatgagtatgagagatgagataaactggttgtcaaattggcgactaggataaaacttatgcgggagggatttggtcctataaaagctaaaacgaaattcccccactgtactgacacttgacaggatctatatttttaaggtatgttattctgactttctttactctattgaaattggaacccatattaaaccaagaaaaataagactgaccaaagtttttagagaaattgtacaaactgaacactcttattactgacaaagagaaacccaactcatttaaaatattatatatataaatcaatggtttgaaatatattggataaatttcatgatcataatcttgagcaacaaaagcttcaaaataataatctcatgcaagaggtgaaatgatctaaataccgggattcttgatggaactaaataatcccgggcaccttctggtgtggatcttgacagaattggagtatcaatctatcttatgaccatgatacaattttgatccataatatggtaaacattacgtacgaagtaatcaaacccctcaatttatgcttttaaagagagatcaagaatgccaaatgcagattggcaagtcctttatcctaattctttcttatagatttcaaaaagagggcaaacccatcaatttgaatataaataaaagatacctagaaaacttagagcaagaccagtgcaacatccagcaacaccgacattaatgaatgcaaatacaaaataattcacattaccagaggaagactactactagaaaaagtattttctacgacggcaaaacgatgatggttcttcaagaaccgtcttaaatttgattgcggtggcaattttataatattgatgacttcaatgacgacagttttccaaaaatcatcctagaaagctgcgttcaatgacgggtttttgtaaaaccgtccttgtttcattttcgttccaacaaaatcaaaatgggtcgcgtttcagtcagtcactcacactcaaagcagcatatatagagattagagagagaaccctaaactaaaaccctaaaattcctctgttgcaatggacatgcatcgacgatgacaaaaagctcgacctcggtgaccttgatctggacattcatcgatttctcacctgaatccgttttctattgccacgttggtgagctttttctcttcttcacttttttttcttcgagttttctctttctcgggattcccttccaatgggatctcatctattattgttcgattactcttcgtagattcttcgattcttagttaaaaaagagcattagggttttctatttttatctaattgcatggaaccaatttgatggaattagataatacaattgattaattaattcttgcatcaaatggtgaaatctgtttaactccttaaatatttatcgaatcagttgatttttcactatgtatatttcaggatcgaaaagtctagtttaaccacacatttgtggtagtagtggaagcataacgaagatgaatggcattgggaaactcaaatcatcgagttctgaattggaccttcacattgaagattacctaccttctggatccagtgttcaacaagaacagcatggcaagctccgactgtatgtatatcctctatttccatttccatgtcttgcttagatgatgaaaaatagagggcagtgaaaatggagattaagggcatgttttgattactcttttcaaaaagagttttagggtctcttagttgtcattttgaatgtgttcccttctgcttttccgaaatgtcctgacaataccgtttccagattacgacttctatattttaggtgtgatttgctagacatttctcctagtctatctgaggcagcacgttccattgtagatgtgaggttttgaccttttgcgtttatttgtagtttttctgctttgtggtttcacttctatgtgagtttttctgctttgtgaggtaattgctgtagttgttagaagttagtagtgttgtgtgtgatttctgttataagaaagtgcaattatgattgtagaatcatcctggggatcacttatgatatttggagtatagatatattctctcacttaggagagcagtggctctcagaaattccctcttccctttctctcttttactgctattttccattctgcaagcatctttgatacatccacgtatcattggtgcttccgttgagagttgaactttcattcccacatgagcacaagaatggcagcacaatgacttgatgccattgaggccaaattggccgccatcaagcttacgctccaaaaccatgagtctttccttgccgctcaatccactaatatggatgaccactcttctaagctggattcgttggtttccactgtttttgatttgtccaactctgttttttccttgtgtgatgagttgcgcgagtccctacactatgggttcgcgggtttagtttgcaacaatggtttgcatggaggaactccttccaacgacgctgcacaggtgacactgcaggttgatctctgttcgttcacaggaactcctcaaccactattgtgaccaacagtttggtaatcccttcgctcaacgataagtatctcgaggcctttgaggtcctcatggctcaggtaccaccattatcgaaggaccaatacatggggattttctttggtgggcttcgtgatgatatcttgtctttttcgatgatatcctggtttatagcgctgattggccttattggagataagcctcttaaggtttatttgtttcctttgtggtgcggtgtgttgtggttcgatatttaattttgttccctattaggttagcttattccttttctatacatacttacatgttatgcatgatgcgatagtacttctgaaatcattcaatcatagagtttgcctagctaatttccaatggtatatttgcttgttatatgcatcgagattgtcagcctagtggccttagaggaaaaagaaaaatagttgaaagattacatataaaactttaattggtagacaaatggaagaatcaatacatgttgaaaaataaaaatataagtagataaaatctgttatttttatcatcttagatgaatggaacgaattttggccaatttgctggaggacatagtttatgctctttatttttaaaatatctatttacttaattgacttatgctgtatgcagctgagtgcatggtataagatgtatacaacttctaatttactctttctattttcctttcctttgatgaatagaaacttcaatatactcacttgcatcaaaccaaggtattctaaattgctcaattctcatttctttgttgcagatgatgtgcagtttctttgttgcatcatggctggggttatcaagtaccatgggccaagacctagtatctgaccaaaacaggtttgtctgatgtatattgaagctagcatgttcttattcacatatccatgaaaatgtaaatgttatttattaataatctgcattttcctttactgaacaggtttttgtggccaatcatacttccatgattgatttcattatctagaacagatgactgcatttgttgttattatgcacaagcatcctggatgggttggtaagtttatagtgctatatattggcttttaaatacacaagaagccttttctctatcatcaaaacagtttttttttgttatctgtatttgcttgtggcatatcatctctgggtgaattagtttttaagaatattatggtgctaacacaattccgcttttcttctgagatatctccaatatattttaaatttgttatcaaaatgaaagcttgttttcaagtcagagaatgtgagtaatccaactattgaagtacaatgaatattttgttactaaactatcttatcagaaagtgggtttgagccctaactccaccctacaaaactggcttgtaaggtgaggattgcccccactcatatagtttatttcggtgctatctttagtcaatgtgggacttcaacatatccccttttgccaacggctatccatcatgtgggactttcaacaccccctgtctagggttgaccataatttaggtggcttttccaacatcccccctcacgctcaagtggggagcaatcgtcaccttagaagtcagttttgtaggatggagttaagctcataacccactttctgacatatctaatcatccagctcaaccttccttcaagtttgattgacacttcacaattacaagttatgtctgatgcatttctgcatttcattcgcaggattattgcaaagcaccaatttagagagtgtagggtgtatctggttcaatcgtacagaggcaaaggatcgagaaattgtggcaaggaagtaagtataattgaaaatgatgggaagtatatacttcaaatcttattcttacctgatttaatatttcccttttctcatccttcatttaattgcaaaatgataattttaaaagtgtaaaatagaactactataagataaacaatgtttaaataaacaatgtgcatgccatctactctttagaatggaaatacattctaaatggattatgaaattaagataattttggtttcaaatgatccattaattgatgattgtaataatttttttaagggtgtgtgtgtgagttattgctaattctttttatctctcagaaaatagaactgagtgaatccatcagatatgcttctggggatcccattgaaagctggcttaacaaattactatgcttgtatatttcaaatgccatccctaatcttagcagcaggttatttctagcttatttcatgttaagttggaagacaagaccgttttttaatctccatgtatttcttttgtcctgaaatcaggttcctccctccatgtagtgagtgtgatctatactatgttaatagggatactctcttttcctatcacagagatagtgaattatttttgcaggtaaaaccagatttatcggatgacgttgggtgggttgtgattaatattttcaagtttagatatggtgctaaaatattgacattcttgcagcaaacgatggccttatatgttgcatcagattacaagaattctccaaatgatttacaactgatgcagatgctccaacacaccacttatttgtactacttggtatacttggttctctttctagttctgctttggttcctcatgatacgattgcagagtatcaaaatatcttgatattgcgaccgcaatagtggttgtgaactgcaatgtagaaccgtagttcctctattttaaacgacatgacttgaatgaggcatatgatggtatttgtatgacaggacctattgatgaatcaaagaatcaacttcctgatattttctgtgtgattcaggtacacatctttggcataaataatcctattttttttgctgcatttctccactgtcttgttggctttctttacgtggcttgcctacactgctctaacagaacttaaaggtttgtttggttcaaggattaagaaaacattttatgtaattttcattaataataccatagttccatcttttttttaattttatttaatatttttcaatgtttgtataggaaaggatgaaaacagtgttttcatgtttgaaaacaaggtgacatgttctgtaattattaccaaggcacttgtgtatgtatatgctatactgattgtatagtgaagctacgttggcatttgtcatatacttgtggtacccaaaaacaaaggtatgaaatccattactgtggtagtgaatctttttaatatttcccttttctcatccttcttttaattgcaaaatgatatttttaaaagtgtaaaatagaactactatccagaaaaggatttgaaacccagcaaggggaaagttaaagtaacatttcaaatggttcttcttgtcttggtgaagttgagctctttctagactaatagagttatataagacttatctagtttgtgccagcagtctttgtaatatatacgtactagctttaattatatatgtacttgtataattaatttgaattgaatttagcctcttgtattttcttttgaaaatgtgaatagttcgaggattttgtttattttttgctgtttctaattgcattgttttctagcctttgatgaactttcagcttccaaaacaagatgattatttttattattatgggaatagtagtcaggatgagagcagaaacaaccaaggtaggcactgttgctatatttgagggtttttgtttatgagagactttgctacttccattttcacgattgtatgtagatattactgtttggctaatgagttgttgttggtttgagaggttggacttagtttaagtgtgttctgtatctttgtgatgcttccatgagtaggtggggggattacaaatcacagtaatgggaatgtgcatgaaaaggaggtgaatttgttcaagaagaggaggtggtctctaaacagtgacaacaaggagaagagcagtttttatggggcacacatgacggaggagcgatatcgatcgatgctgggagagcatattctgaaatacaagaggaggtttaagggtaccttgggtagtcccgcccaaaatcaggctgctgctccacttgtaacaagcaacacgggattaatagctcacaagtcagggaatgagcgtaggggaggaggatcacatgtggcggagagtacattggaatggatggatgattccagttctcagaaacctagaaactaccgcgatgcaaatttctcgccgcaatatggcactgataggtttgccttttctactctatttcccttttatggtgtttgagtttttgaatcgtgaatcatggtttaagtggaaaattacgtaattaccttgtggttgtgaactcctttcatgattatgtatgaacctgcatctttggatattgggaatggaatcatttacaaggttcctttagtctatgataagttggctggagctctgaacctcccaagcttctcggatatccatgttgatgatttttacttaaagggtactttggatttaggctccttgcctgaaatgatggttgctgataaaagattttggaacatacaccaagaaggcatgggagaagcaataccacatttttgaataactgcaggcacgactgaaggtcatgtcagcttctaatttggctcataaattcagtttgaaaatgtctgatgttgatttgaattcctccattccggagggggcagcgggaagtataaggcgatctattttgtttgagggtggagtattgcaggtttattatgtgaaggttttggagaaaggtgacacctatgaggtatctatcatataaaatgaattgatgttttcccctttacactctcccttattttttatcatttagctttgcctctttggattacttcagatcattgaaagaagcctacctaagaagcaaaaggtgaagaaagaccctgctttgatagagaaggaggaaatggaaagatgtggaaaattttgggcaaatattgtaagaagagacataccaaagcaccataggaacttcactatttttcatcgaaagcaactcattgatgccaagaagatctcagagacttgtcaaagagagtcattgccctaaatacatattctaactgttatattttgtatcgatttatggtttatctagaatctaggtgtctagtttatagattttgatgttagattttgtattcagcattttgtctacagtaacttattacttatatggacctatttttctttcaggtcagaatgaaagttagtagatcccttaaatggacaaggactgcctgtatgagcacccggaaactagctagagacatgttactgttctggaaacgaatagacaaggagatggcatttcttaattccttcctgaaattattgattatatggtgctcgatattgaactctggaagacagtgtatttcaagaagtcatcttttttatgtgattatggtgacctttagtgtaacatgatggctgcatactctccctttactttttgaagtcaagtttcatgcatgatagttgataataggttttacctactaatgtatgtcagtatgtctgcatgtatttcgttgatgcatgtttatcttatggataacagttttgaattctcttttcactgagattattgaaatgatgtcacagttcttagggattcttctaaaattgatttatgaagtaaacgaaagatgataatttaaaggtgcaactttttattttcactaagaatattgcttgaacctatgagtaatgatggtcagatggtggatttagtaaggcaaagttgagaatagggtggaaaaaatgttggagtattttacttcatttttgttgttacttgcccagtaaggggtgaggtagatttctaaaaaaaaataaataaattgcctcgagctggtgtgattcaaaaaggaagaaaaattatgctcagataaggttatttttctcaatataagtaccttatgtcatttagcgagtaacctaccaacaaaatcggtctctaaaaatcgaactcaaattgaatgtgctgatcttgttggatttattattgatcatcatggtatttaggtattgatacaagtggtttttaatgatttcattttcctattcagtattttcattgcatagttactccttgcattatgtagacagattagtgggcagctaaagccattcgaaattgttgcaagtttgactgcagaacgggatggtgaaactaggaatgctgcattaaatacactagctactgtcatacgttgtagaactccatctttctggtttccaatgtgcttgataaaaacttgtgcctagttatataaatatatatatatatatatacatcttcaatttccttggtttatttcctatgggtgtagttgttttgctatggcgtggagatacaagacagggttgttccttatacttactgtggttgccatatgggtgacctctgctgaagtcacccaggtaaaattttgccaattccatgctgccaacaaatgttccctttttgaagcttctttaggcatgtacttttagtgtaactagtattgtagtcttttaaataaattatatttgaatttatataaaaaaatccaaattatgatatattaagctgttctaaaattaaaatttaaaacaaaaaagcgattaagaaaattaagtatacataattataatttaaaataaaggaataggtaggtatcttcctaatgatggccacactatagtctcttatatatagcttcaatcataagccttgacttaagcaattgaaagaattaatttgtacagtgtgatttactaactatggattctatattattgcattatgagatcagcccttcatgtaatcactgttaacaaaccagctaaaccgatgctcacaatatctctaatttagtatttctctcttcacaggtttatggagctgaggcaacaataaaagactcgtgcaaccagccaatccaatgcataactgctattgcttaattatccatttttagactgatcctttcttttttgactgtaaggttcatcgctagtttgaagtgataattgattcttggttccattttcaactctcaagattgttaactctcgtgagttagagcataggatgttataagtggtcagcaatgttttatattttctagtattttggtaatatagtgttggtacaataaactggaatttgtaatggttttaggttatgtgatgtggtttcaatatttgatgaatgtccatagttagtaagatggttattaagaaaaattataaacaaacaaagatggttattaagaaaaaatcgtctttgtatgttgacatacgaagacggttatttcttaaaaatcgtcttcgtagatgttaagattttaaaaaaataaaataaaacacaaacaaagatggttattagggaaaaacatacgaagacagtttctccttaataatagtcttcgtaggtgtttaatttaaaaaataaataaataacataaaatacaaacagagacgattatttggaaaaaaccgtagtcgtatgttgacatacgatgacggtttttccttaataaccgtcttcataggtgtttaattttaaaaaaataaaatacaaacaaagacggttattacgaaaaagtcatctttgtatgacaacatacgaagacgatttttccttaaaaactgtcttcgtaggtgtttaattaaaaaaaaaaatacaaacaaagacggttatttggaaaaaaaacgtattcgtatgttgacatacaatgacagtttttccttaataaccgtcttcataggtgtttaatttaagaaaataaaataaaattaaatacaaacaaagacggttattgcggaaaaaccgtcctcgtgtgttgacaaatgatgacggtttttccttaataaccatcttcgtaggtgtttaattaaaaaaaaaaaacaaatttaaatacaaacaaagatgatttttctttaaaaaccgtcttcatatgttgacatgcaatgacgatttttccttaataactgtcttcgtttgtgtttaattaaaaaaaaattcaaaccaagacggtttttttgaatcatcgtcgaatgtttccattttcaacgacatgtgcaacaatgacgattcaacaaccgtcgtcgtatgacctaaataaccgtcgttgtaggcttcctgtgtagtagtgatcacttaaaagcaaaagttataaattttatatctaaatatccatattatcatcctttcccctaagtcttttcaagatgcatacaaccaaactatgaactccagacaaaactgcaaatgtctaatgacagaaagaacaacaaaattacttacaatctaaattaaagcataaaaataatgtaaaacaaataggggaaaaaaaggcagcgagaatctcaatgtacctttgcataagaccctacttctacaaaggtttctttaaaatctttcttcttaaacaatccagcacctgaaacacaccgaacattcatccttaagaaaaatcagaaaaatacaagtgacaaatgacaattaagcaatcaaaagtcaaatttcttagaggtttttttctctaaaaaagtccttgtgccagcttatttttcactcaaatacacactgaacataactaacctatccttcagcttatttttctctagaataaaaattaagtaataacaaaatatgttatttccctatctttcagagcatgcatgcaatctgtttgaaaaattgtcaatcaacaaatcataaatcagaggtaaaaaggtagggctgagacaaatcttcatgttccaaaaattcaacatgaagcaatttaaattcatcattttctatccaccataactacctaacacaagtacgaacactcattcaacatgtacagtccaaaatagtaaaattacacgtggcaacctcataaagacctatggacacgtggccaccctccctgtcagcatggtctcattaatcagcgcctatccggtccccagataccagcccggacattgtgtccgggctcctagttaataccgctattggagcacggacgtcgaccctcggcaggagcccggacatcagcaatattctcctcgtccgttcactgcctatctaaatgcaaggatattcaaataaaggcaaccttcctatcttatcatatatcaacaagttatctacaagttgttacttatctacaagtaacaatatatctacaaggtacatattatctctaattcaaattaagataactgcctgctattatctgtattgttatctcatcaacagattatctataagcaaaggcccaaggtccaccccacgctataaataaaccctccaggttgacttctctccatctctcactcgatactcatccctcactcctcattcactcccgactcactctacatttcattctattcaagccttacgcttgacacacttcacttttacttgaatgcattactcaagttctttattctcctcacattaggctgagtccacacttggccatccttataaatttaatgttctgacttaagcgtcggagtgtttttcctttgttttgcaggtccctcctctgagcaaagcctaactttactctgacatcacggaatttggagtccaccaaggccacgtcaagcccacacgtggaatttctagattttgacaagaacatttggcgcccaccgtggggccgcggtaaaacttaccctgcggccttgcatctcaaaagatcatcagcattcggccatggtcagtacacgttccagcgttaggcgtgacacccctgtcgacgcatctaaccctccacaaactaccatgacgaatgccgacaccatacgacaactccagaaccgcatagtggagatggaacgccgacaccaagaagaaattcaaaggttgaaagctgatcacgaagaagcttgagtaagacacactcgagaggacgaacgcactcacaccaccagagaagaacagacacaaggcgagtcacaaccttgacagaatgtcgaccctccaggaacccgcagtttaatgcagggataccggagggaaaggcataacatccgccgtaatccgcttgtcgaccgtatcatggaggtcgacattcctttcggttggaaacctctacacttggagaggtacgacggaaccactgatccggatgagcatcttgacgccttcttctcgcaggcaaatctttacaccaacaacgacgccatactatgtcgcgtgtttcctacgtccttgaagggagccgcgttaacatggtatggtgatctacctgaacagtccatcgacagtttcgacacccttgtcgagaagttcagtgctcaatatgccacaagccggattcacaggctgacattcgctgcactagcgacactgcaccaagccgataatgaacctctccgtaagttcatggaacgattctcacatgtcacctctcagatcaggaacctaaatcctgaagtagtgttgcattccatgatgctggccttacgacctggtaaattcatggatagtctatgcaagaaacctccttctagcatggacgaaatatgtgaaagagccaaaggctacatccagatggaagagatgtctaagttccgcaacgagcttcggcaggcatgacaaaaacgcgagaagcatgaaatacctgtcgatcctcgacggaataataagaaacatagatcgtacaaaccacaacttatctccaaaggacccaggttcgagaggtacactcccctgacagtcaataaagccatggttatggacgaagcgttcaatacggaagtccaggtaactctaccctctccctccagaataggaggacaccctaacaaatattgcaggtatcaccatggcgctggacacagtacggaagattgtgttgctctgaaagataatattgaagaactcattcaagcagggcacttgtcaaggtttataaagaaacctgacaatccccctccagtgcacaggcaagaggagcgacgtgaagatcgcttcaggaacaataacagacgcagggatgacacagaagacagagggaggtagagaccaccgcaacacggacgcgaacgacaaccccctcgtcaacaaggagaagatcccaatcaacaaattcatgatgtgattcataccatcgctgggggcatctcttatggaggatcgtcaagtcaatcccgaaaaagacacttgcattccatcagagatattgacattaactccgtcaatagtctgccaattcgaagtttgcctcctattacttttacggacgctgatttcgaagggattgatcctatccatcaagatgatcctatggttgtgtccctcatcatagccaatttcaaggtgacaaaagtactcattgatcaaggtagctcagctgatgtcttatacctaaagaccttccagaagctggagatttcatcatcagcaatacaaccctgttcagaacctctcctaggcttcgcaggagaaagagttgacacaatgggatacgttgacctaatgaccacattcggtcacggtctgctatccagaactttcacgatcagatacaacattgtagacgctgatacgtcctacctcgttctaataagtaggaaaacactaaacgagttgggggctatagtctctacccctcacttaaaaatgaaatttcctacaataacgggagaaatcgtcactgtaaaggcagaccaaaagcaagccagacaatgctatgtcgaaagtcttaaagtggcaccatatcctcccagcagacgaccagtcagacatgataccacttcggggggtaccacccaggtaatgaatatcgataaaaatttgtttccctctacactgacagtatttgtagcccatgatagtcaagccttcgatgtcgatccacgcgatgataacgtcgacaaaggaccaaaaccgatcgaagagctagtcaagctgcagctagttcccaagcctggacaatgcacacagctcagcaaagggctcaccaaccatgaatacaggcacatagccgatgtgctccagaaaaatgcagcactctttgcttggcaaccacctgacatgcctggcatcgaccctagtgtcatatgtcacaggttagcaatatgtccacaagccaagcctgttgcacaaaaaaagcgaaatatgggagaagaacgaagaaaagcggtcaaggaagaaattgacaaattactcaaggccaacttcatcagagaagtctgatactcgacatggctcgccaatgttgtcatggttaaaaaagccagtggcaaatggcgtatgtgcacggactttacagacctgaacaaagcatgtcccaaggatgcgtacccgttgcccaacattgacagactcgtcgatggagcgtccgggttccacatactaagcttcctggacgcatattctggttataatcaaatcagaatgcacgcttcagacgaggagatgaacgccttcatcaccgaagacgctaattactgttacagggttatgccgttcggcctcaaaaatgcaggagccacttaccaacgactgatggaccgtgttttcaaaagacagattggacgcaacgtcgaggtatacgtagacgacatggttgtcaagtctcagagtgtggcccaacacgtagcggatctggaagaggtattcgaggagattcgaaagtatgacatgtgccttaatcccgagtaatgcacattcgaggtaggcggcggcaagttcctcagattcatgataacacaccgaggtattgaagccaacccggacaagtgctcagccatattacaaatgcgcagcccgaccaatgtcaatgaagttcagaagctgaatgggagactagccgcgctatctaggtttcttccaaagctagctgaaaaagcaaaacctttttataggttgctcaccaagacaacaccattcctatgggatgacacttgtgagaaagccttcatgacgttcaaagaaacgatggctgcgccacccgtcttgagtcgacctcgacaagacacgccattgcttttatatctctctgcaatggatgatgccattagctcagcactcatccaagaagaaggaaggagccaactccctatttatttcagcagtcgcatgctacatgatgctgaaaagcgttaccaaatgatgcagaagatagccttggcactgatcacttctgctagacgcctcagacagtattttcagagtcaccaggtaatagttaaaactaattatcctattaagcaggtactcaggaaaccagaactggcagaacgaatggtagcatggtcagtcgaactgtcagaattcgacattcgatacgagccacgcggtccaataaaggcacaattcatggcagactttctagatgaatttgctgtgaaagaagaacccatcccagactggtggaatctctatgtggacggagcatccaatgtccagggaagcggagcaggcatcatacttgaaggactcggcaacatctcgctggagcaagcccttaaattcaacttcaaggcttccaacaaccaggctgagtatgaggcactcattgcaggactcaaactcgtcaaggaagtcggggctcgatacctgagatgctactctgactctcaactggtccagggacatatagcggacaaatatcaaaccaaagaagcgatactcctacagtattaccacttggccaaaacacttatagacagcttcaaatgttttgagaagcatcacatacctcgagagaataacgcacgggcagacctgctgtctaagctggctagcaccaaaaaagctggacatctcaagacaatcattcaggaaacacttcagaaaccgaccattgacacctcaatggtaatggctatccaaactcaggagtccacttggatgacgccctatagggatttcctcctaaagggcatactcccagggaacgagagtgaggccagacggttgaagcgaaaagctagctattatgtcatcattgacaacgagttattcaaaagaggactaacagcaccgctgctcaagtgtctagacaaatcgcaggctgactgtcctgagagagcttcacgaagggatatgcagactccacacaggaggaagatccttagctaccaaggtagtacgtgcaggatattattgaccaacactcaagatggacgcttgcaattttatacgcagatgcaaaaaatgccaagaatttgcagatatcccacggattcccccagataaccttcacacgatattttccccatggcccttcgccatgtggggcatggatattttggggccttttccaaaagcacctgggatgttaaagtttctgttggtggccatcgactacttcaccaaatggatcgaagcaaaaccacttcgagaaataactgccagcgaagtagaaagcttcacgtggaaaaatcttatatgcaggtatggtctaccctatgccatcatcacggacaatggaacgcaattcaaagcatagacatatgaagatttcctcaccagactaggcattaaacacctagtcacgtccattgagcacccccagaccaatggtcaagcagaagcgacaaacagagttattctcaaagcccttcgtactaggcttgacaagtccaaagggctctggagggaggaactaccaagtatactatgggcatatcattgtacgcctcaaagcaccacaaaggaatcccttttcgcttgacatatgggactgatgccatgatccctgtcgagttaggggaactttcagccagaagaatgctttttcaggaaaaacacaacgaagacaacatgcgagtggagctggaaactagcgaggaacttcgagacatagccaaaatcaaggaagaagcagccaagcttcgcatgacacgaagacataattccaaagtacagccagcctcgaactttccaaccaggcgacctagtctggcgtgtttgaggagaagctagaaaagaacctcgtgcaggcaagctcggaccaaactgggagggcccattcagagttgtcactaacctggacaacggcgcctacagattgcaggaactcaacggcaaggacattccaagaacgtggaatgccacccacttgaagttctatttcagctaagaagatcaagaccggatgatgtactctttttcctatttcaagtccttttttcccactgggtttttcacttgaaaaggttttaacaaggcacatccgaagaataataagatgtattcaagattattacatcaataaacatatccttttttgtcttttatttatgtcaatattacagaatccttgactatattattgcttgagtatgctcctggcttccaggttcagctccgacaaaggctcaagaccatgtcttgacaacttaaccagggtctacccttggcaagtctcattaaaatccagggcggacgcgtcctggtacttgtaaaggttcatgaaaaactgggggcttccctagtaggacctccaacaaaacccaaggcatccctttggtcgaaaacaggttcttaaaatccattaacccggtgaaccaagctaaaaatccagggtcgaaacctagtactctacaaaggttcgtgaaatcctagggttctcctagttggacctccagtaaaatccaaggtagccccttggtcggacatacagtcagtaattcaggtttcccggttgactacaaaattccaaggtccgtccttggtccggggtccgcctcggtgatctgaccaaactacgcagaaccatccaaccaggttcataagactagagcgttggtcggcgcaaaattccaaggttcgtccttggtccagggtccgcctcggtgatccgaccaaactacgcagaaccatccaaccaagttcttaagactagagcgttggtcggcacaaaactccaaggtccgtccttggtctggggtccgcctcggtgatccgaccaaactacgcagaaccattcagacaggttcgtaagactagagcgttggtcggcaacctcagaattctttctgggtcattcataggtccataaacccaagctctgacagtcttggtcgaccttcctctttacaggttcataaatccaagctctgacagtcttggtcgaccttcctctttacaggttcataaatccaagctctgacagtcttggtcgaccttcatctttacaggttcataaacccaagctttggtagaccgtcaaggttcataaacctaagtcttggtcaaccttcatctatacagatttataaaatccgagctaaggtagactgtcaaggtccataaaccctcaaagcttcagtcaacatcttaaaatctagggtggacgcaccactggtacatcctcgagtggactcaagaccgtgtcttgaagaatcctgacaaaatccagcatggacaactccgctggtaccagacttgacaactataaggtatgactatgtctaccctcgacatatgttatcgttgttatctttttccttgcaggaataaattcgacataaaaaccaagtaagttttcttggtatcatgggatcctaatggagaaaaccatgccataaatccgcatagttatcaacaattctcgataacccatgattctcatacttgagattaatttgcggtcaacctcgttatcatcaaattatttattaaagaagcacgaggtatgaagcgttttattatggtgatttcagtgctcacaatttttattaatatagaaatatgagcgacaaagaaacatcttttatacaagtgtccgagttcatacacttgaaatcatgactcctatggaacctcgacaaacaataccataggatatttctattttgcaggaataattttattttgcaggatagttgttcaaaaaccaccctcgacacaatgctcatggtggaaactttgacaaaaagaatatcctcagaaaactgtgacaagtcaaaatcaatagtggctcaaagatcaagctcgacgttgtaagatctcaaacatctctttgacagaatcatattttccaagcctcagcatgcagattgggacattttttaagattgagcagcatacagttgagcaggccacaaatgaacgaatagagcaagtaaaagaagatacaaaagattgaagcaaaagaagaacatacttttcattgatttgtcaagaaatttacaaagactttacgaaaaaaagtaaaagcataaaaagactcaaacatcagcagcctcactgaccgattcttcagcagatccaatctcttcttcatcaaccaagacaccatccttgacatctttgaaaggatcaaattgatccaagtcaaggtccttggcaaataggccagcctggcgcacaactttgaagaaacccttttcatggtgctccactgcctcacgcctcaaaattgccaactccccattaagctccttactaatggccttctcaacagaaagttcaagatgagcttccctcagtctgtctctttcaatggctaactcatccttagccttttgtaccttctccctctcagctgccaaatcctcttcagccctcttcccttttgacaagcatcgcaaagtttgtccttttcaaacttaagtttaggaaatccaattactaagttcttccttatgagcttgttcatatgatgcatgttgatgtgacttgctcttctatgtcaaagccatgattcatcaattttacttactaagcagtttatgttatgaatgaatgcatgttctattacaagcaagtaaatgtttccttttctttttccaacatgtattacctcataagttttgccatcacatatcaagcaacatttattgttaaaggatacctttaatcctttgtcaccactactacataatcacaaaactacgacgattgaatacagtgtacaatgacgattatatgcccgtcgttgttatgacagtcgttaaatgtgttccctatacgacaacggtcatataactgtctttgttcaatccttttctaagacggtttatgaaccaaaccgtcgttgcattatttgaattttttaattaattagaaaaatgggacaatagctacgacggtttcaactgactaaccatcttacatgttaacacccgacattgaaggtgccaaatataagacagttcctccattggaactgtcatagacatgggtggagtttttttttttttttaacgagaatgattatttctaagacagttgcatataacaaccgtctttgaatatgtcgtgtttttttttttttgctttttatcnnnnnntttagattaaaataaaaattttggtatttggcatcattattaaaaccaaccaacaaacaaaataatattatcccctcaccccccaaaagacaaactaaataactagtaaagtaaataagtaataaataaataactaatatttaaataactaataaataaataagataaataaatgtatagatcctctatttacttttgtatcattaaaataaagaaaaggaatgttataatatcaatgaaggtgctcaatacagcactattactatggatgtataacatgtgtatactctaaacccatgccaaaatctaagacttacctagtttataaaataatatattaagaaaaggtggaagcttacaccagaaaacaccttatatatagcattacattgccccatactctaatgattcccatttgaaggtctggaagacatgataaactgtaggtgagcttttcaagagcaaagctacacagacatatagatctgctatagtcaccatggataacatgactggcctataaaccattgatgttctgatgccaccataaggcaagcacttttccatgcatccttcaattcccacctgaacacagcagagataaggtgagaaaggttgtatactaaagtgtgatcaattttaaagagaagcccaaatacttctaaagcgggaaaagaacaattttataatttataataaaaagtaaaattagactaatgcaaagacaggtgagtaagaaaacattttataattttataatttataatcgccccaaatactcccttagttgaccggagaagacgggcagaatgtggtggtgcatcctcccgaggagcgtgacccgattccgttgattattcatcatctccccattgccgttacctttggatttttcagcaatgaaaatctccttgtacgaattccttttttatcaatgctcttttcatctggttttgtttttagtgttttttagttagggttagggtttatgtgtgtaggttatagatccgacgtaccatgaagagtgtatgatgaaggccgcatgattgccacgcttaattcaaacggcgacgtttgtgcaattcaaaagcatgggcgagagagtgtctctcagagcgttatcatgcattgcttgaaactatctcatgttaaagctactaatattacaactaagattagggatgccatgagttctcttttcttgcctgctatatttgcacctgtttatttgtcatatcaaatttgtagtttatattctttgtgaatagattaggttgaaatacacaacaatgaaagggctttacggaagattaaatgccattcttcgtctgttgttgtggatgtatgtggggaaaaacaaaatcaattagatgctagtcgtttgtgtgaaaataagggaacacttcacacttaaccaagagggggggtgaattggttagtcttggtaaattaaaaactttcttgataaaaacagagtttcaatagcaaaaccagagtttctttgcccttaggatctttatcacaaattcaatcaaaaatctttatccaagatcaatccaagacttgtaatgcctcaagaaacaaaacacaaactagaattcacaagggaataatcaaatatgcagaagaggatagcacacacaagatttatactggttcacctcaaacactatgaggctacatccagtttcttctactcaacactagagtaaagttccactattgcaaatattatccttacaagcaattacaaacttctcttcatcaaccctagatgaagttcagagatccaagaccctattggacccttagaagccaaacccagactgagaacactactcagctgtccttggagaaacactatctccacttgcaagaaatacccacttacaatagagtcaacaaaacaaagttacaactgaaaactttacacccacaaagagtaaggaaagaattcacctgatgatccaagaatgaaatggatagaatgaaaataatcaggttaaatggagaaccaattatgcagaacagctttccttagcctttgtgaaagaactatcttgcttcactaaaaccttagtgacccatatgagaatctatggaagcaagagcctatgaacccagaagaatgcctttgtgaatgtttagaatgctttcagatcgctctctattcaaaattccagtcctctaagtcaaacaaggcatgggttcaatttatactaaaaattgtaacagaattaatcaattaaaaacgctcctgtaatcgattgtttagcatttgtaatcgattacatatgctcctgtaatcgattaaaccgttcatagtaattctgggttttcaataacgggtcatttaatcgattaatccaacgtgtaatcgattactccaggaagtatgaaaattctgtttgaactgagtaatcgattacaatatttggtaattgattaaggcagacttatgcaaaatcatgtttaagtaaaataatcgattacggtccataataatcgattaagccagacaaggtgcaaaatcatgtttgtgtaatataatcaattacaatatctggtaatcgattaaggcagcgtgagtgcaaaacatgaactaacctatataatcgattacaataggtggtaatcgattaaggcagagtgactatattttccagataggcatgtaatcgattacagtacaatggtaatcgattaaacaagtttagcctattttttaaaaaatacttagcttctttttaagttctaattcaaatacttaaagcctatatgatgcaatgcttgaaatgtgtatgaatgatatgcatgcaaagcttggatcaccagaatgctttccatccttttacatttaatcacaaacttcatcttcaaagcttcatgcatgttgaaagtcaaaacttcatccaagtcttcacattgcttgattcttcaggtaatcttcaaatagctccccctcaaatcaacaatttggacaaattgaagctgaaagaagaagaagaaagtcttatgggatgtgaagccacactatcaggacaaaagcaaagtaaggatggagtctcaaagaatttcaccggtggtccctcgagttggtaagatactagctagtccaagaactaacagttttctttgtattggttttatgttttaaaatttattgtgaaaatgaatagaataccttaaaacaaccaagaggagggggtgaattggttgaatcttacccaattaaaattttaaaatcagagtttaccaaggatctttatcactttaaaaattattctaaaaagaagaatcaatattcaatcaacttcccttttcaagaacaacagaaaacagagaataactttctgtgcaatgaaattgattcacaaacaaagtaagcaagagatgaaaaagtgagaagaaagattagtcacagaattttatactggttcacctcaaaccctatgaggctacatccagttcttctactcaacactagagtagagttccactattgaaaaaatatccttacaagaaaatttacaagcctctcttcatcaaccctagatgaagttcagagatccaaaaccctattagatccttagagaccaaaacccatactgagaacactactcagctgtcttttagagaaacactatctcacacttgcaagagacccatttacaataggctaaccttttcagaaattcaaataacagttttacaacatcaaagaacatggaaagatatcagctgataatccaagaatgaatgaacaatgaatgattctcaggttgaatgacagattgcaaacacatatgcagttctttccttatgctttgaatgattgaggcttcaccttcttgattcaaaaacccatttaaattttgtgaagctaagtgtgtttagaactcaaagaaactcaataatgaaagctcagaatatctatgaatgcttttggattcgtaatttcgcaattgattcaaaagatttttgacctcagcataagaggctccttttataacagctttttaactgaaaataatcnnnnnnnnnnnnnnnnnnnnnnnnnnnnnnnnnnnnnnnnnnnnnnnnnnnnnnnnnnnnnnnnnnnnnnnnnnnnnnnnnnnnnnnnnnnnnnnnnnnnnnnnnnnnnnnnnnnnnnnnnnnnnnnnnnnnnnnnnnnnnnnnnnnnnnnnnnnnnnnnnnnnnnnnnnnnnnnnnnnnnnnnnnnnnnnnnnnnnnnnnnnnnnnnnnnnnnnnnnnnnnnnnnnnnnnnnnnnnnnnnnnnnnnnnnnnnnnnnnnnnnnnnnnnnnnnnnnnnnnnnnnnnnnnnnnnnnnnnnnnnnnnnnnnnnnnnnnnnnnnnnnnnnnnnnnnnnnnnnnnnnnnnnnnnnnnnnnnnnnnnnnnnnnnnnnnnnnnnnnnnnnnnnnnnnnnnnnnnnnnnnnnnnnnnnnnnnnnnnnnnnnnnnnnnnnnnnnnnnntgattaagcaaaggtacttggagatcaatttgaaaaagctattgtttgaacaagcattataatcctgaaaactttcaaacaatcttgccaaaaacaagtgttaaagcacatgttgttcatgaagcattcatttaagcattatactattgtattaggttcagttttacacataaactccccctaaattccagcattcattcaaattaatttctgggcaaaaattgaataaaaaaaacagggatgaacagagtacattttaaactactcccccttaatcaattctccccctatttggcttgttaaaagtcaaaaataatgtgagcacagcggattttaaaactggaataacattgcatcattaatagagaagcatatggggcagtacataatgaatttaaaatcctgaactcaaaacaaaacagagcataatattacaactagaattttttttttaaatataaactaagaatcctagaattctgcagatgctctatcatccatgttggtttcaatagcctctagcctttccctaatgtcttctaaggcttcatgtgtttcagccttgaagtcttcttggagcttcaagagagaatccatcttttgaatcataagagattcaaatctgagaaagcttgctgggacgactgtggttgttcttgttgtccttcatccgcagaatcagcagcaatctctccttgctcagcagcaccaaattgggaagccattacccagccattgggtgtcttcctcatgcccatcttggttagatgcttctccttaatttggctattgtaggcaagggtgttgtctaccacttaattttcaacatcaatgttgaaatgatcaatgagtcttgaaataaaaacaggataggggaaagggtaattaaccaaccttttggatttcaacatgatctcttgaaagatcaaagcccaattcatgggaatatagtgcttcagcccatacaccaactgaagatcttcatcagtggcttgggcatggttggttgccctaggagttatgatgtaagtaattaagtagtgcagcaacctatcttctgctgtcatcggacctgtgcaaagcctggtcctaagcctcatgtgaggatcatgaagcatgctcctgtaggtgtccatcttgctatacccatcaggatcttcatcaaatctgcgtgctccctcactgacaattcctcccactgtttcccaaatttcaggggtgatgtgcatagtaacccctttcactttggacctcatgtctccctgcattgaacccttcaagcaggtgtagaagacacgaactagatcagggtaaaaggtacccttcatctctagaaatctcttcaagccttgtgactctaaataggcaggaaattggaatccttgtctaataaaccaatcaagctctatgtattttggtgtagccacaggcttagtggcattaaactgaagatagttaattttatctgtctcagaagagaaccagatatcaagcctatcaacgggttgtggctgaggttcaggttgaggttggggttgagaagaggattcaccatgtctcctctttggtttcctaatccttttggaagcagactcagacatgatactaaaaaaaaaggcttagacaaagcttttagtcacacagagaagtagaaaattgcagaaaatatgcaaagggtcactactagaaaaataggttttaacatcggctgtttaacatcggttactgataggaccgatgttaacaaaaacgcggtggcaattttgtaaataagtggactaatttaacatcggttttaaagatttttcacaaaaccgatgttaaccttgaacggttaacatcggttttcaatatttttaagcataaccgatgttaacgatgaaatgttaacatcggttttccagatttttaagtaaaaccgatgttaaccatgaaaagttaacattggttgtccagattttaagtaaaaccgatgttaaaccatgaaaagttaacatcggttgtcatgattttacgtaaaaccgatgttaaccatgaaaagttaacatcggttgtccagtttttaagtaaaaccgatgttaacgatgaaattttaacatcggttttctagatttttaagtataaccgatgttaaaataagatattaacatcggttttgctatgggaaccgatgttgtgggtatgagatacgacgtcatgacgattaaacttcagtatcgcgccttaaatcctttgtcttttccgaaaagcttcgtaacccttcacaacccttcactctcgcgcccatttctatgaaaggctccctcgttgtcgtcgctgactgaagcgctatcttcttctcctttgtgcattgtcgagacccccactgaagcgctatcacaccatctcttcttctccagttctcctttgagccttgtcgacagcccatctgttctccgttgtgccttcgcccatatcacggtccacatctcttcttctccttccgcgcgctgtgaccaccattgtcgggcattgttggtggcttgctgaggtcgcggtcgcccaaggttagtatcctgtgcttccatgaattaatacctgaagttgctgaggttgcgcattgtgaaagacatgatattttatcattgtagtgtttaaccgggagaatcatgatatcatgagaatcattgtgttgttcgtgttgtttatgatgcttatgattactgctatccattattctgtctttgactctatgttggatttcaatacagttagtttagtacttttgattggttggtccttcaaagttttcttcaatttgtggtctaatttttgttacagggtttacggggtaattatatgaaaatatggccccattggctggttagttgtgtggactgaataaaaagcaaagattgatcctctgattgaaatataactctatattgatcccaggtatgtatccagccattcactagttgttgtggttggttctatattgtttttccctttttgaaattcagttcccaattgctctggctgatgttctgttgtctttggttcatgagactgatgttctgttgtctttggtttagtttaggcaagaaaatgagaataaaaaaataaaaaaaggtgaaatgcatcattaaacgtgtaagatattgatataaacaagagaatggataaaagaagacaaaaatatataaataaataaaggaagaacgatgtaaacaaatatggtgtatgtggttgtgcgctatgtggctgcccataaatgaaacaggccctaaaattgtagctgatgaggaaattcgagagtgagcttcggatgataccgaagttagtaggtgttttgtgtcttaaaggaaatgagaattcgataatgtttgttccattggttgcgattagtggctagttggatgaaggacaaagacttgatctcagatacttaaagaaaagtaatgatcaccatttggagcttggctacaacgaacattattaaaacaatgataatatttatggttctctgttcatgccttgtaatagttgtttttgttgtggttttgggttgagcgtcatttgttggtaaagactttcttcgcttcaatcgtcagcctagtcttcgtaaaatgtctatcaagtggcatagaatgaaaatgatgccttattctactttttggcttaacttgtctataacttctaccttatgatggtgaagttacagacaagttaagccggaaagtgaataatgcatcattttcattctatgccacatgatagaccttttacgaagactaggctagcgattgaagagaacaaagtctccatcattcaaatgacggtcaacccaaaaccacaacaaaaacaactattacaagacattaacagaaaatcataaatattatcattgttttaattatgttcgttgtagccaagctcgaaatggtgatcactacttttctttaagtatctgagatcaagtctctgtccctcatccaatcgaccactaattgcaaccaatggaacaaacattatggaattctcatttcctttaagacacaaaacacctactaacttcggtatcatccgaagctcactctcgaatttcctcatcagctacaattttagggcctgtttcatttatgggcagccacatagcgcacagtcacatacaccatatttgattacatatttcttcctttatttatttatatatttttgtcttcttttatccattctcttctgttatttatataggcagccacatagcgcatacatgcacatagcgcatacacacacattccatgtataggtttagtgatgagtttaaagttgcattaaccagataaattgcatactacatataatttcatggctatgttccctcaaacataggtaatgactattcttgttttttaattctttgcaggaacatcatttatatgtagttgtcctttgcgtctttgtatcatcatcaccagattcattgttggagattgtcattgaccatcatctcaggtactgacaaatgcctttcaaatttttttaccttctatatgtgatgcgtacttgtgtaaattgttttatgccattaatgactatgtctatatacaaataatgttcattatgagtgaaccgtagtttcccgtttgagattcattacagtgattcttccggacagtttggattaatcattgtattgaatcttgaattgtccgtttggacagtttgggagggcttatatttttttagtatattcacatttatacgttgtcattcttgtcttaaatatgataaaatttcggttcaatgcatttgactttgttctccgggtgcatacttgactatggtggaactcatgtcaccgctttcatttcgtgtacttggagaccaaagcgaaatgctgctgaaatttcgtcatatttaggataaagactcaacgtatagatatgaatatactttaaaaatatgccttcctgaatgggatagggccacaccttgaatgaaaaaagtgaggttttcatgcatggatgaactttgtcagtatcccagagttggtaaccacatggatcgatcttggatgaatgcacctcgcatcacggttgagtacgaacaaggagttgaaaatttcttacaatttgcctccgaaagaggtcgacccgatggggatggaaaatatttcttcccctgtatcaattgtttgaatggtagacggcaaacactagaagacatacgggagcatcttctgtgcgatgggattaagaagacttatacgacatggatatggcatggtgagtcgacagagacgcagagggtctcgcatgctgannnnnnnnnnttatcaagaaacaacatcagtttttaaaagtaaaccgatgttgtttgtttataacaacatcggttttcgtgagaaaaccgatgttactgcattaaaacaacatcggttttctctgaaaaaccgatgttgttatcaacaaacaacatcggtttactatataaaaccgatgttgttatgaataaacaacatcggtttacattgaaaaccgatgttgatttacatgttaacatcggttctacgacaaaaccgatgttgtcaaaccatcgtttattcttttgaggattttcatatactacatgtccacatcggttactgatggcaacccgatgtacttaatgtctgttaacatcggttttcggaactgatgttaaattatcaactttcaacgtcggctgattcaatatcggcccagaaccgatgttaaatgtctaaaataaccgatgttgaaagctgcttttctagtagtgggtcagaaatgcctaagtgtagtgaaccatgcttttgaatcactatttataagcaaggattgggcttctaacgttcaatattttgaaaaacatagctgttgggaagttttaatgacattgggtgttggtttaagacggattggacagtttaattaaccaaaaaaaaactgtcagatttcagacaacagcacgaataatcgattatttcgtaaagtaatcgattattccagttcaatgtgttttcagttaaacatgataatcgattaattttgttgtgaaatcgattatttcagagcattgatccattgaacatgtaacagagcaatatgtaatcgattatcccgagtggtaatcaattatcacagagtgagcatcattttaatatgaatggtaatcgattacggctcgtaagtaatcgatattccagagagacgtgctttgaaggtttgaacttttagacaatgtaatcgattatcccgatgtgtaatcgattattccataaaaatgtgtattcttaaaatgtgaagaatagtcgattaccattggtgtgtaatcgattacatgattacaattttcgttccagacttaggttttcatgattttaatcgattaactcgtggtgtaattgattactacagtgtatttgtcatatacagagcattttagcagctttttgataatgattcaaacatattagcattcagtgatatataggctttcaatcatcacatagaaacacatataatcaagctagataatgttgttttcatcaagaattcctagcatgtttctaagtgaataaaatctatctctagataatggttttgtaaaaatatcagctagttgatgattggtgtcaatgaattctacctttatgttacctttttgaacctgatccctgaggaaatgatgtcttatctcaatgtgctttgttcttaaatgcattatagggttctttgatatattgatggcactagtattgtcacatagcagaggtatagcattcagttccactccataatcaagcatttgctgtttgagccacaagctttgtgcacaacaacttccagctaaaatgtattcagcctcagcagtggataatgccacacatgattgcttcttgcagtgccatgagattaatgaacttccaagtaaatggcaagtgccacttgtgcttttcctatctaatttgcaacctacaaaattagagtcagaataaccaataatatttatagaagctccttttggataccaaagaccaacttttggagtagctttgagatatttcagaattcttttgacagcagtcatatgtgattctttaggattagcttgatatctagcacacaaacaaacactgagcattatgtcaggtctacttgctgtcaaatacaacaatgatccaatcattcctctgtactttgactcatcaactttctttccactttcatctgaatcaaggtaagttgatgtggccatgggagttgtggcatccttgcttttctccatctcaaatttcttgataatctcaagacagtatttggattggttaagaaaggttccattcttcatttgcttcacttgaagtccaaggaagaatgtgagttcacccatcattgacatttcaaattccttctgcatagctgatgaaaaatccttgcataacttgttgttagtagaaacaaatataatatcatccacataaatttgaactaataagaaatcattgccaagccttttgataaacaaggttttatcaacattgccccttgtaaatgattgttcaagcagaaatttgcttaatctttcataccattgcctaggagcttgttttaaaccataaagtgcctttttaagtttgtatacatgatttggatgtttaaaatctttaaaaccaggaggttgttcaacatatatgtcctcctcaatgtatccatttaagaaagcacttttaatatccatttgaaaaagtttgaaatccatgaggcatgcatatgcaagtaataatctgattgcttnnnnnnnnnngggagttgcagcatccttgcttttctccatctcaaatttcttgataatctcaagacagtatttagattggttaagaaaggttccattcttcatttgcttcacttgaagtccaaggaagaatgtgagttcacccatcattgacatttcaaattccttctgcatagctgatgaaaaatccttgcataacttgttgttagtagaaacaaatataatatcatccacataaatttgaactaataagaaatcattgccaagccttttgataaacaaggttttatcaacattgccccttgtaaatgattgttcaagcagaaatttgcttaatctttcataccattgcctaggagcttgttttaaaccataaagtgcctttttaagtttgtatacatgatttggatgtttaaaatctttaaaaccaggaggttgttcaacatatatgtcctcctcaatgtatccatttaagaaagcacttttaatatccatttgaaaaagtttgaaatccatgaggcatgcatatgcaagtaataatctgattgcttccaatcttgcaactggagcaaaagtttccttatagtcaatgccttcctcttggttatagcctttagcaaccaatctagctttgttcctaactatgattccactttcatcaagcttatttctgaaaacccattttgtgccaatgggtttaagagatgaaggtttaggaacaagttcccaaacttcgttcctcttaaactgattaagctcttcatgcatggcatgcatccaatgttcatcattcaaggcttgatcaatgttcttaggctcaatttgagaaacaaaagccatatcacaacataagtttttcaatgaggatctagtagatactccctttgaaacttcacctattatgttgtcaagtaatagatctcttgttgttctccagtccttaggcaattgtacaggggtagtggattctttttcagctattggttcttcaattttggttgagggattgcctatattaataatttcttccagctgacctgcatcattatccagctctttttcttcttttgaggggttagtttcatcacaaataacatgtacagattcttcaatacacattgttcttttattgaatactctatatgccttgctatgtagtgaatatcgaaggaaaattgcttcatctgccttagcatcaaattttccaagtgattctttcccattgttcagtacaaaacacttgctgccaaaaacttttaaatgagcaacattgggctttcttcctttgtatagctcataaggggttttctttaaaataggccttataagtaatctattcaaagtataacacacagtacttactgcatcagcccaaaaatacttaggtaaatttgattcattaagaagtgttcttgctccttcctcaagagatctatttttcctttccacaacaccattttgttggggtgttcttggagctgaaaaattgtggtttattccattttcttcacagaatttttcaaaatgttcattttggaattcaccaccatggtcacttcttattgannnnnnnnnntgtgtgcccattcttcatacaatagttgcaagtgacagattttgaagttctcccaaaaccagaatatttgttgactcttgagttcttttgccacttttgattcttctgttttggaggtacaaaaactgtttttccaaatgattttgctccatgtttataccccaaactagaagtatctccagcatacttttgcacactcagcatttcagccaagttgcattttcctttataaaactttctcaagagatcaatcaaatcactgtttttggctaaaagcaacatatatttttcaccttgactctttttattctcatcaaaatctttttgaagcaagttatacttatcaacattgctagaagaagtggcacacacacatccatttaatttataacttgaaacaagtttttcattctcttccttcaagttgcaaattttattttgcaaatcagttattttctcaatatgccatctaagatttcctttgagcttattattggattttgcaagtttttgggcttccttatacatttcttgaaatgcatgaatagcttggtcaaggtcagaatttacctcatcttcttcactaagcatatcatcatcatcttcattgatggtagaggtaagacacatgtttgcttcttcattctctgaagaagaatctgaactagttgattcattgtcttcccatgctatgtatgccctctttccttttccttcctttttcatcttgctttctccttgttgcttccttaagtagattgagcactcaaatttgatgtgacccggtttgccacactcaaagcatgtgtaattgttgtcaatcttcttgttgaggttgttgttggtgttgctgtttttgttgcctttcgtgaatctcttattcttgtttttcctcagaaatttgctgaacttttttaccaccaagttcacattgtcctcatcatcctcttcacttgattcctcctctttttcagctttcaaagttgcagctttcaaggctatgcttcttgttttcttttttgcatcttcataagatgttaattgtgacatttctaattcatattcaagaagcttaccaaacaatgcagccatagacatttttgacaagtccttggactccttgattgctgtaacttttggttgccaaggtcttgttaagcacttcaatattttgatgtttagctcttcagtgtcaaagacctttccaagacccaatagatgatttacaatgtgtgtaaatctagtttgcagctgagagatgctttcattggaattcatcttgaacatttcatactcatggatcaaagcatgcttccttgatcttctgacttcctcagttccttcatgagtaatttccagcatctcccacatctcttttgcacttgtgcatctcacagtcctgaaaaattcatcagaggaaagtgcagaggtgatcatatttttagctttaaaatcatattggactactctttgttcagcctcagtcatctcatcccattctttgggaatcaactcatttgcaacagttttcaatagcattccatgctcctgggtcatttgattgaataaagatcttcattctgtttttccaaaaactgaattgttccccttcaaacattggaggtctgtttaaagaggcaccctccttaaaggtgatttgtgaagtattcatgtttctttttgaaaagaaaaagtgatcttgaatatcttacaagaaccagctcttgatgccaattgaaaatgaatagaatacctcaaaacaaccaagagggggggggtgaattggttgaatcttacccaattaaaattttaaaatcagagtttaccaaggatctttatcactttaaaaattattctaaaaacaagaatcaatattcaatcaacgtcccttttcaagaacaacagaaaacagagaataactttctgtgcaatgaaattgattcacaaacaaagtaagcaagagatgaaaaagtgagaagaaagattagtcacagaattttatactggttcacctcaaaccctatgaggctacatccaattcttctactcaacactagagtagagttccactattgaaaaaatatccttacaagaaaatttacaagcctctcttcatcaaccctagatgaagttcagagatccaaaaccctattagatccttagagaccaaaacccccactgagaacactactcagctgtcttttagagaaacactatctcacacttgcaagaaacccatttacaatagactaaccttttcagaaattcaaataacagttttacaacatcaaagaacaaggaaagatatcacctgataatccaagaatgaatgaacaatgaatgattctcaggttgaatgacagattacaaacacatatgcagttctttccttatgctttgaatgattaaggcttcaccttcttgattcaaaaacccatttaaattttgtgaagctaagtgtgtttagaactcaaagaaactcaataatgaaagctcagaatatctatgaatgcttttggattcgtaatttcgcaattgattcaaaagatttttgacctcagcataagaggctccttttataacagctttttaactgaaaataatcgattaaacacgctcctgtaatcgattatttatcatttgtaatcaattaaatcaagattgtaatcgattaaaatgctcctattattttctggattttgaactataaacaatataatcgattaatccgtgaagtaatcgattaaaccagtcagtcatgcattctaaatgagcttagtaatcgattaatacgatatgtaatcgattaagacagtgagctgtgattcttctattatgcatgtgatcctttgtaatcgattatcacgatgtgtaatcgattaagacagagagatgtgatttttctaagtctacatgcataggcttgtaatcgattaccaactctatgtaatcgattaagacagagagttccattttacataaaaagctttagtaatcgattaaaccgatatgtaatcgattacaatnaattaattgcttttacttaatcaattaattcaatgatcctaaatgaatgattgatgcatgatgtgcacacttggattatcagatcatatacttccttttacaatttatcaaatttgattcttcaagctttcctttgaacatattctttgagcatgttgaagagtccaaaaccttgaagcttgatcttcattccttgatgcttggcttcacttgaatcaacatattgatagtctagttgtttctagtccagtccatttattactgctagagacctgcaaatgcagagaaattatcattgtcttataaacaaaaaataaatagtactctactcacatgtatgatatatcagtggcataacaaagtgctccagatcatgtatataaatctaaaatgaacttttatgagactgaagactatttacagccactggatagataagttggaaatttactacaataaaacaacagagtgatagatagtaaactgaaattagtaattgttatggccaggtcattctgaggtctttccattctgactattgtctattttaagaagaaattctttggttaaactatttgtttggtccttatagttcctattttaagttttagtcctacacgagaaaattgcaagttctagtctctgtatgagaaaactttaagttctagtccctacacatgcataaaagtaaagttttggtccctgatattagtgctagagaaaattttctgacagtataaaaccgctccaaaaactctatgatagtaataaatcgctacaaaaatttggctaaggactaaaacttacaattttctggtatacggactaaagcttataatgggatcaaatattgggaccaaatgaatagtttaaccaaatccttttaaaacttaacagaaaacattttatatcttgtcaccatttgttagatctacagaatattaggagaaaagagagctttatgattgaattcaataataacggtaaattcgagggtgccgacaactccagagttttcagaagaaggagggaagaaatttgtaattgtttatcatattcccctaccagcacaagcttttcttacttaaagagaaataacgacactctcgtaagggattgggccatcacttccgatttatttactaacaactcagactcttagtaactacaatttgggctcagcctagttatggcccacttattccatgaggtaatccttggtccacacactcttgaccttaactcttgttccccttcttgtattctctgctccacttccctctgttccactttcccttgtcttcttcactctttcctctacctcttcactgaccatcttcccgtcgtgttgcccaggattcgcatcaaatccctccgcccttaaagactcgatcttgccctcaagatcaaactgaggaaaggcttgttgaaactcagtgaaagacacccatgaagcatcttctaagggtaaaccttgccactgtaccagaacttgcaagtctgcagcttttcccttttgtatcgtgcgggaacgcaaaatggctactggctctgtcaccggaggtaaaggttgagggtgaaagaacagatttttacggtaagctttgagtaatgaaacatgaaaaacggggtggatgcgtgcgccagcaggaagggataaacgataagccactgatcctatcttttcagcaaccagaaaaggaccatagtaccttcagcgaagcttggaaaatgtctgattgcgtatagatttctgtctgtatggttgaagtttgacaagcacttgatctcccatagcatagtgcacatctctgcgatgtttatccgcttgattcttcatgcgttgacgaactcgatgaaggttctcacggagctgtctgatgatattatccctctgtgttaataaagtatctacagcttctattggggaagtagcaccatcataaggttgcagagccagtggagggcgtccataaaggatctagaaaggactagcaccaatggaagaatggaaggaggaattataagaaaactcctcccacggtaaatattgtgcccaacttttgggattctccatagtataacatctcaaatattgttctaacccatgatttgtaacttcagtctgaccatcactttctggatgattcgtagtactaaaatggagctttgtgccgctcagtcaaaagagttcttgccagaatttactgaggaaaatacgatcccgatcgaaaacgatggaacgaggcataccatggtggcagcagatgtcagatatgaatactgaagccactttggaagcggtgaagttccctgataaggcacaaaaatgagcatacttggacagacggtccactaaaaccatgataacagtcattccatctgatggtggaagtccaatgatgaagtccatagataattcttcccaaactgccttgggaatagataggggttggagtagaccaacaggggataagggctggtattttgtaacttgacaaactggacaggtgcgcacaaattcctgaacatcaattttcatgtttggccaataataatgggtagaaattcgatgtagtgttttgcgaatccctccatgacctccaattacagaggaatagagttcatgtagcagaggggtgcgaagatcagatgtgctagcaatcacaatgcgacccttaaaaaaaatcaacccatcctttacaaggtattgctcaaatccttccttttgttcctctattgctttaatgatcttaactaattctgacttttgtgtgacctcagctctaattgaatctaacagtggattaacaagtgtggacatggtctgcatctctgaatgggaaacctccccatttggttctccctcatgcatcctggataaggcgtcagctaccttattcatggctccaggataatattctatggtataatcgaagcccaacaacttcactaaaaacctctgctattctggggtttgaattacttgggccatcagctctttgatgctacgctgatctgttctaatcacaaattttctccccaacaagtactggcggaactttgcaaccccttcaattatagcaaataactcacggacataagtggatgactgttgcatttttggagagagcttacggctaaaataggcaataggctgattgttttggctgagcacttccccgatacctatgccagatgcatcagtggtaagcacgaagggcttgctgaagtcgggtaatgctagtactggagaatgagataaacattccttcagctggttcattgcttgtgtcgcttgggcactccacttgaacacatccttctacaacagtgtagttaatggtgctgcaatctgagaaaaatttcgcacaaacttgcggtaatatcccgcgagcccaaggaatccccttagttgtttgactgtggtgggttcttgccattcctgaattgctttaatctttccctcatccggtctaactccttttccatcaactatgtgtcccaaatactcaacctccatctgagcaaatgcacacttctcaagtttagcatagagttggttgttttgtaaacactgtagtactagccgcaaatgcaccaagtgttcctccaatgtcttactatacaccaaaatgtcatcgaaaaacacaattacaaattttctgagaaattccttcaaaacataattcattatcccttgaaatgtgaccagagcattagtaaggccaaaaggcatcactacaaactcgtaatggccctcgtgagtacggaatgccgttttaaaaatatactgctcagccattcggacctgatgataacctgatctaaggtccatcttagaaaaaatggaagctcctgctaattcatccagcatctcctccaccgtgggaattggaaagctatgtgaaacagtcacttagttgagggctcgataatcaacacaaaacctccaggtaccatccttctttttaactagtaattcgggagaggagaatgggctcaaactgggttgtattactcctgactctaacatctccttcaccattttttccaattcagttttctaaaagtgtggatagcggtatggtctaacactgatggcctttgttcctggttctaaatggatttggtgattagctgctctttttggaggcaaactggttggtttctcaaaaaccttggtgaattcttgcaatacctgctgcactctactatcaatatccttggtgccttctgtatgaatttgatctgattgctcaatagcatgtaactgatataaacatgccactgagttggaagatgtgagcttgcgaaactggtttaactggatggcctgtatattaagattggactccccttgtatctccacagtgtgaccattcctctcaaatttcatcagcaacttcttatagtttatagtgacatctccccattctgatagcctgatgaggatcaagaaaatgagtgaagagcctagatacctccaatgttttgaacataacttgagttttagatatctgttttaggcattctttgatgcgtttgaaagctctaaagattccctacaaattgtatttctagtctcaagtccaaattctgcatctatgatgatgaaaataggacataaaattcagcacaaattacattttttagtataaggaatatgtgactgaagtcccacattggagagaaaaaagagagagacaccacttgttggctataaatagtcattcatttgtcttatgtaagcacctttgaattgaataaaacctttacacttttaaaagtgtatgagaggaagttcctcttgggttcttaattggaccaaacattggttcttatcaaaggttttctataatctttgtggcgaatccccacgggacttatcacttttcataaggtgtggcgtcttcttccatttcttgtctttcccgtctttttatttttattctatttttttaacattttgttcatgttaaattcgttatttttgctctgcacttttcttcgtattgtctttatctttatttctttttgtcaaacacttggtttgcacacttttcttatgttttaacaagaagccttttcaaggacgatccgtaaaaaacaatgaaccccatattggttcatatcatgtggtatcttgggttcttaattggaccaaacattggttcttatcaaaggttttctataatctttgtggcgaatccccacgggacttatcacttttcataaggtgtggcgtcttcttccatttcttgtctttcccgcctttttatttttattctatttttttttaacattttgttcatgttaaattcgttatttttgctcttcacttttcttcatattgtctttatctttatttcttttcgtcaaacacttggtttgcacacttttcttatgtcttaacaagaagccttttcaaggacgatccgtaaaaacaatgaaccccatattggttcatatcatggccactgcacccctaagaccacttcagctccttgaattggcaaaacatataagtcaggacaaaatatgtgcccttgtatttccaattgtaccctggggcacactcctagacaatccatgatctctccatttcccaccaacacctggaatctctgcgttggtatagtttccaaccccaaaaaatttactaaacgttcttgaataaaattgtgagtggatccaccatccaccaatatctgaattgtagcattattgattttccccttaatgcgcagggtactagtagaatgttgaccagccatggcatggaggctgatctcagacattggttcttcgttcccaattttttttattactatcttcctgttccagttcaaaattatcagattctgtggtgccttcttcctcttactggatcatcatgcaaaacattttacccttgcaattatggtttctactaaatttctcatcacagtaataacacagtcctttttcccttttttcatcatttcagcagcagttaattttttaacaggtaaggttcccttgttaattcccacaccagtagtaagagccctgggtggtgttggtagtatacctgagtgttgactgttaattcccatggtgttggttcgctgggaataagttcgtgcagtacttttatcattcagcttgtcctccactatcttggctaagtcaattgcttgctccaatgtttcaggaaggtgcatacagacctccttgcgtatttctggcctcaatccggattcaaaatagctctgaagacttacatcatcaataccaatcacttggttggcaagatgctcaaactgagattgataatcagctactgaagatccttgagttaatcgactcaactctccatgcagatctcgatatctggagggtccaaatcttgcacgcaaagcttcaataaactgatccaggttcgcaacctaccattacgatccatccaatggtaccattcttctgcctgtccatccatatgaaatgaagtgagtgtgaatttctctgtatcattcaaattgtgaaatccataaaactgttgaatcttatgtatccatggttctggatttcctcctgagaaactaggtatggttagcttgactgacttgaaggcattgttaccaaagaagccgcctaatctgtcaccagatgagttttctctcttcgacttgtttttctgattttgatccatcttagcttccatcagtgttaacttcagatttatttcacgtaacagagctccaaccgaattgaactgctcatcatgattgttcaacctgtttatgcactcatcaatggcactttgtttaacagcattgcgagttccttctgccatcgtagcacagaagttttctctcaatgaaagcaccaaaaatgttagatctacagaatattaggagaaaagagagctttatgattgaattcaataacaacggcaaattcaagggtgccaacaactccagagttttcagaagaaggagggaagaaatttgtaattgtttatcatattcccctaccagcacaagcttttcctacttaaagagaaataacgacactctcctaagggattgggccatcacttccggtttatttactaacaactcagactcttagtaactacaatttgagctcagcctagttatggcccacttattccatgaggtaatccttggtccacacactcttgaccttaactcttgttccccttcttgtattctctgctccacttccctctgttccactttcccttgtcttcttcactctttcctctacctcttcactgaccatcttcccgtcgtgttgcccaggattcgcatcaccattgctccttcaccttcctcagggatccctactcagagtgtcaattcagatcttctaaaagcttctctagcttcatgtggtaatagcttctctataatcttcaattatgatattagctgttatgtggcttttgattgaaccagtggtttattgtctgaatttgattgaataaattataaacttctccataaacacttataggagaagaaaataagactaaagaatgcattgagcttcttcataagctaataaaatcaacttgtgcgttttagtttttggagaagttcaatgaaagagcttctattagagttcaatgaaaagtatttccacatttaactcgaaagagagttctgacaatggagtagatggttggtgaaattccaacatatttgctctatgtgactgctggaaactctgttggaaatgtctctgaataatcagaaaggtagaaatttatgatgagttcggggagtttacaccttagcatattttgaccagagtacttataaatctataccacattttggggtgtatttatgtacggacgagagggattgaaagaaaaatgaaaatgaagagacaaattggttgctgtgataagtgatgtgataagaaaactgaagattaatagaaagaaaatgagatggaacagaaagtggatatataaggttagcctaatatagttactggtttgacatatataaggttagcctaatgttttgatttctaatcacatgttgatatttctaatcaaatactgatggtttacaggcacatgaattccttaatctaatcagatgctgctttgtgttgatgtgcagaatattgacaaaattccactcgttaattgccctattctcataattcttgcaagttttctttgaagatgctgcatcatttgtttttattgagtcagatagccttttctagagtaacttatatctggcttattttctctttgctctttacccttttaaaaaaattctttacttttattgtggactggtttgtagtttcaccctatgacttggaatatttatatagttctaaacttggaatatgcaaaaaactatttctacttctcgttatttccatatgacttggaatgcttttgtcatgtctcgtgtctgtggtagactttctagtttaatttttatatgttcttaatgtaatattttgtactattaactatttaaaaaatatattaggtataattttcaaatattaattataactgtatatacatataatataattatatcacagtgtaaaaatatatactatattaccatacgtcctatttttacatttctttgttcctcattattaatattgtatttatttaaatgaaactgatcttgaatctggctccattcgataaaggttttgaaaagatggtgaactnnnnnnnnnnnnnnnnnnnnnnnnnnnnnnnnnnnnnnnnnnnnnnnnnnnnnnnnnnnnnnnnnnnnnnnnnnnnnnnnnnnnaaaaaaaaaaaaaaaaagtacaacttaagaatttcaaggaaacttattgatgcctaaaaccaatctgtttgcaactacaaatcaattaggtatccttcaatataaaaagttattgtcttcttaacattttctccccattttgacttccttttttctaaagctaataatttttaagatgtttggtctttggcctatgtccgagtagtctgacttcttcttttgttgatatatggatatagttgttctgttttatgcttgcaaaaagagcagtgggttgtgtaacttaatgaatattggttttgattgttagtatgttcagaaggacaatgccaagggtgttgctcgcaaagagtcaaaagacaagtcagcctttattgtggtcccccgacgagacgatcaatcagctgaatcaagtataaaaggaattcgtgaaattgaaacttgtaattcattgcgctttattagttattctgcatctccatgtctaattttttattatcaactttcactgcatgaacagaatgccaagtgacatttccataatcatatttgtctctgcagtatggtgtaacacgacctcagcttttgtcgctgcagtatcttctaacccattatcatatttgctcattgcttatgatttagttcctaatttgtatcttctaacccataatcataactcaagtacagcttggctaccctattatccctctataaccattgaaacaaccagttatgagcagaacatagtagggggctaaaacaaaaatgcctatcctgaagcatatatttagaagagagctcaatattggttagtattgtactctttccttttttaatatcatatctattatattgaaggatctggatcccctatggtaattgtctctctctctctaaatgttagtggatctgatttgctggtttgaaccaacccaatttttgagagaaacaaaaacttagaactaagattagcaaggcatccaatcattcatttttaattttcatacatttttaagatttgcttaagtttgtaattgatatttatatattttagctgataaatgttttaaatttcttatttgtaattgatgaatatgcagtgcatggtattgaaggtcccttttctggaatttgactgacttctgagtcaggaaagaaaaaaatccttcttcttaaagggaaacagcgggaaattcccactgtaggttttgttttaccaattaaggtttcatttcttttcaacaatatcttcttatcttcattttgctttcctttgctaattaaattgacactcttatttccttctaaaatgctgctcttcatactaatcaagattataaaaaagtatatttttctcccatgctacgtttatgagttagtatgagtttgagcagacacataattttttctcaggattgcagtgttttggttttgaatgcaaaattatagttgttcctttgttatgttgtgatactgagattttgaatcaaatggcatttattacagatcctacggttgtatttgttattttattggtttttgtttttcttgctttattctgttttcaaatccttcttagttgctaatgaggggatgtcaagccgatcgatacacttaaagcctggaaattaaagtcattcttaattaaatgtgttttaagtcttttagtttattgttctcatgtggaatcaagttgatagttaaagaaatatttggttctagtaaattattttttttcctttctttgaataattaggggactagctaatagcaatatcttcagagaaaaataatgaaattggttatgtgcttgatttaattaattgagcataattgctacgtcaaggtcaagtgcgcatgtgttaattaatgtgcacgtgtacatgttgatacatgtataaaaatatttgtcactcactagttctacatatttagaataagaggaggaattgaggggtaccttactttgagttgagttgagagttataaggaggaattggggggtaccttacctttaagagggaggaattggtgggaagaataacgtatgtatcatgtttatttcaagaattatttttagcttaagaaaataaagaaaatagatactgatatatactataagtttaagcctcgccacacatacagtattatttcatatgacttatatccttgctttgctcggtgactcaaattataatttaataataaataatataataatgtgtgatcaaattacagcgtacgtagtctccaatcttttattatttctcttgtttaatcacaattttaatgatttatgtgagtgagaatgctgcatttgatcttttgaaacaatctctgtcatgcttaatattttttataatttgcaacagagaaatttcctgaatgtgatccatgccccaatttatatacatctacctactatctagattcctttttcacacttattagttagccttttaattatagctcactgactaatgatatgactggaagcctatgagccctcaagatcaacaatagaaacaggccggtcacatgaaggtatctgaaccttttcttttggtggatattagccgaaattacttacaagattccaagacatactcatataaataaaggggttaaacattcatattacatcatcattaatgtatagcaaataactaacataaaaaatgactcatatatgacataaaaatatgcatggacaacataaatatataatttagattagttgtaattttttatgtaaagaatttgtactttcttctttaactatattttctgaaaattgaaaataatatgaaaatatcattgatgtaggataatatatatatataatacaaagaaaccaccgttactatataaagcaactaatgatttcttatatatatatatatatatatatatatatatatatatatatatatatatatatatatttgcatgttgtgttggctttttttgttttcgttggggggtatagtgaagtttctactatatgggaccaagactagaattatagtcatttcaatatcaagctttggtgaaatttgcaatatcatccgcgatgtcttcctctaattctttgataattagtatggacagagcacaagcaagtatggcataattaataaattgagttaaatatagggccattgctatagtgacatattgcatgtctttaataaccagagtttaattagtagtgctcagaagtaatatatttgtaaataataaaagtaataatagagtaatataagacaatctgtaattggataacgaactcatatttatttgtcatgtatacacacacactatgatgcaatagtttttctttaaaaattaaggattcgaatatggtaaaatatattacgaaacatattattttttatttaaaattgcttatattttattattttatttttcttattttttaatgtagctgatnnnnnnnnnnatttagattagttgcaattttttatgtaaagaatctgtactttcttctttaactatattttccgaaaattgaaaataatatgaaaatgatcattgatgtaagataatttatatatatatatatatattattgaaaaatatttaattaataaataatttagattcatttattgtttataaattaaaatatgttttcataatatattactttatatttttcacacattaaagttatttttaatttataattgattttatttatttaaattataagtgcatatatgtattctaaaaattaattaaattaaaaattagtgcataagaggataaaatgctgaaaatgttggatgaaatgcaattagtataccagtaatctacaatagtgtataagaggataaaatgcaattagtgttggagtataagtgtgagttaaagtcccacatcggataaaaatagaaaagtttaacaccatataagtgaggagaagacccataaacctgagcattaaggttttggattaaggtgtggtgtctaattcacttatatgattattcagtataaatctccccgatatttaccccctcgattttccaacatttggtatcagagccgatggttcgacttggttaccggctcgtttgtttaggcggcgtttgtggatccatggacatgagatcctttatatcgaaagtcatcctggcgagtgagtccatgcatgtgtaggccaggcaagctcgaggaggaacggtacaagatttggtttcttctcgaggaggagtttgtttaccatgtggaagagactcacacttgagggggagattgttggagtacaagtgtgagttaaagtctcacatcagatagaaatagacaagttgaacaccatataagtgaagagaagacccataaacctgaaccttaaggttctgggttaaggtgtggtgtccaattcacttatatggttacttaggtgtaaatctccccgatatttaccctcctcgatttcccaacaattggtatcagagtcgatggttcgacttggttaccgacttgtttgtttagacagtgtttgtggatccatggacatgagatccattgtatcgaaagtcttcctggcgagtgaatccatgcatgtgtaggccaagtcttcctggagagtgaatctatgcatgtgtaggacaggcagtgagtcttgtaagtgttgttgcaacggtacaagatttggtttccgctcgagggggagtttgtttaccatatgaaagagactcacactagaggggagattgttagaatacaagtgtgagttaaaagtcccacatcggatagaaatagaaaagtttaacaccaaataagtgagtagaagacccataaacctgagccttaaggttttggattaaggtgtggtgtccttgggttaaggtgtgtggtgtccaattcacttagatgattactcaggtgtaaatctccccgatatttacctccctcgatttcccaacaattagtttggatcaaggatgaacaagagctaagttgagaacttgcttcttttactaggaaggctcaacattacttatgcctcaacgtggtaaattatgcactaatcatgtttttcatgattgataatttttcatgatgttgacaaacaagagctaagttgagaacttgcaatagtatatataatatatgaactataaattaggtggggttagctgcatcgatcaaatgacaccagtgttttgtcataaaacgtgttttcataaagcccatttagattttagtatgttacttggttcacatgaatgagttaatgtcaaaccttctctttacccctttttctttctgtttttgcatgcttcagttacaccagttgcatgcttcaggtgtcttgaatgacctttggtattttccttgatgaacctaactttttggttatggtaaaaaattgttgatctttaactttggattatggcttgttatggttgcacctattttttgcatcattaatttcgactaattggtaattgttggtgtgggattatttggtgtagtcatatttgcttaattgagcttttatattttacatattacttatatgttttgatgatatattcaatgcatgtcctgatgatctcatgaagtttgtcacttcactcatgtatgacctagacagttattattataactcggttgttttgttgtaataaaagttattttcaattaaaaatagaacaaaatcatgaatgtaaaactgcacagctagataagacaaaccattgcaataacaggttataaattttgagaatgattgttgtagctggttgttcattgattctatgaacatgttaagaaggatgcatgtaagatttctgaaaagtgaaaagtgactttcctactctaggagctggaaaaaatatatggaaaattctatcaaatatttatgaagttgttcaatcatttttctaggattactaaatggtaataaaacataagtgtaactcactttttttctttataatactatgactttgaaagtacttggtgtgactattttaagttaatgttcttgtgatatcatgagaaccataatgacttgagaaacattctcaaaaccttgaatgcagttagtagtttaagacattcttccacaatatgattgaattttggatttaaattcttaatatgtcatgtcaataatatttttttgtactggccaagtaacttgttggtcttttgttgttgaaggtagttccttttcttctactaggatcagagtacgaccacgtaattactatctggaggctgtgtgccattggtgaggaaaccatcaactctatattcttttccactttacagtttcatttattccatacatcttgctaaatcttgctaaattgctagtgtttatatataaggacaagatttcttgtcagcttcagtgtcccaaagctttattcttgctacactattcagataaaccacataggtatgggtccacctaattgctggaaacttcatgtctgtccatttgttattgcttaatagtagaaattttttgttgtgcagctaagggcttgaaatcatggttgttggacacaaggagtgcttgcactcacaagaagaaagtgatggcatcaacactcctggccttctggaatctatctttaatcaaacaaggtgtggttagtctcagactgtaaggaccctccatgtggcgggtggcgccagatcccacgctgatagcgccgggatccttcagcagaaaaccctgtatagggtgtggcactgatggcgccagggctggcgcgggtcgcgccagaccctctggaacttcacgcctggggcgtgagagttggcgctgagggcgccaattgggtttggagtgtgacgcggatcgcgcggggttggcgcggatcgcgccacaggttcggcttgtccacgctgatggcgtggaagcggcgctgatggcgccacattactgtacctggcgcggatggagcggcatcccgcgcggatcgcgcgggaaagtcggtgcagactatttttaaaaggggggtcgcattttcagaagataaaaccttctcttcttcttccccacgaacccagcccccattaaagctgctcccaagcttcctaggaccttatatcttggccttaacacttccttatggccttgaaccttgagagaaacctttggaaagcttaaatcctttatcctttctcttagaaaccccttttgtgagcaaatccctttcctcagagaaacctcagagaacttgagattggcgaagacccacggcgtataaaggacgcagaagctcgaggaagctgtcctgaggcctttagagtcgccactgaggtaagaaactcaagtttctccggttgattttggacttggggttttggtgaatagtgacccatctgtgatagggctagaattagctctgggtccaattgagagaagtgtttagaatgaggagaggagggaggattagctttcagtttgtgatttagagactgttggttttggctctaggttgtgcatgtgtgacttggactgagtcacttgatatgagacatgcaagagccaaattgatggacttgaggtgcctgataggccatggtgacggtgtctagagggtggaactgtccaagccctatggaatctctgatgagttgagatgtaggagcttttagctcaaggataaatggccagaggggagtctgtggggactctgatgccatacatgatcagagatagaccactggggggctgtggaaaggttagtgaggataagcctgaagaaccttgggtagatgacctggttctatggaagggactaaggatcctttctctgagacagttgaggactgtctgatgagcttagaagtgttatgtgcttgaatggtctgtaatgtatgttggttgtctttatagggcttgacacgaggtgtcagtggagcagaccattgaccggagactgaagctacaagcacaactgtcaggtaagctcatcgttctgggtattattccctgtctcttgtttgccacctaagtaggtaaaaatggcccgatatgtttgaatatattgatatatgtacataatatgcatgctgcggactgaagggccagtgtggcctgttttgaggaatatatgtacaagatgaaccctaggttagacaccgagatggtgtgagggtactgtggcacctatggctacaggtgcaaggccttaggtcattgaattgctgaacaccatgaggtgttcaaggatttggatgagatgcagatcggaacaggatctgtgatggaacctataggataccttgatgggtatcgggctagctgaggttccctagccagaggaagagtttgaggactccctggaatggctgagattccatgggaggtgccactgctctccactaaagtcctaaggctggtttactttacatggatgttcctccttaggcagagatgatgagagtcctgagggattgtcctcaagcgattattttgagattgataaagaccatagtggtggtctgtgtttgaggagagatggacacggtgattgtgtccgagttctgagattctctggccagtagaatagagtcctatagtgataggacagcggatatgtggttggaagccctaagagatgagtgcctcctgtgtgagatgatctctcttaggcatgtggttgagtcctaagagatgagtgcctcttgtgtgagatgatctctcttagacatgtggttgagcacctgagggatagagtgcctcctgtgtgagatgatctctctcaggtagtggtttgacagtctgagggatggagtgcctccctgtgtgagatgatctctctcagaccatgattagaagtcctgaggggtagagtgcctccctgtgtgagatgatctctctcaggcaatggatctggaagccctgaaagatgagtgcctccctgtgtgagatggtctctttcaggcatatgttgtagagagacctgggggacggtgctccctgtatggataatttcccagtcctgttgaaaggaagtcctgagtttagaggattcttaggcagtatgtataaggacctgagtaagtgactcaggcaatgtttatgtaatatgagactgtgcctctatggtatatgctatgtccagtggattgacacggatgattaggtacctctgtgagacctctgagagacctctgagagacctctgtgagataagtctagtatggtttgagagcctatattaggcagaatacctccgatgctgagagcatctgatggtgtcccagatagctgggattgtgtggaagctaggctatggtgctaggtgctatgtgtatgagctgggataatatccttagctctgttatatgtttgtgtgtgtgctcggaggtaaaccagggtaagggaggatatcccagaaccctgagcttactgagacgtttgtctcaccctgttatgggttgttgttttcaggtaaatcttagcagaggagcgacttgagggcaggaggccctagtggatctgataggctggagagtgggttgcagtagaagaccagagttgagctcaagacttgaagcgggtcttagtctccctgtatagcggtagggtgcgtgtacacccgcttgtactgtacatattggttgtaaggccagtatggtctagtggtagaacatgtatatgtacagatggttatgttgtattaaagtttaagattcctcctgactatctttgatgtttgatttatatctgcctatatttttatgttgaatttactggatcacaggggcttgttattatagtggtttaaattccatgcataatgaaatcaataaaacgattttagcgcttccgcataccgcatatacttaacgttgttagcgtgatactgattttatggatgataacgcaccgggtgcacacggggtgttacacagactacttggaaattggactctaaatttttctcaggatagatttttttgcttctcaatatatatatatatatatatatatatatatatatatatatatttgcatgttgtgttggctttttttgttttcgttggggggtatagtgaagtttctactatatgggaccaagactagaattatagtcatttcaatatcaagctttggtgaaatttgcaatatcatccgcgatgtcttcctctaattctttgataattagtatggacagagcacaagcaagtatggcataattaataaattgagttaaatatagggccattgctatagtgacatattgcatgtctttaataaccagagtttaattagtagtgctcagaagtaatatatttgtaaataataaaagtaataatagagtaatataagacaatctgtaattggataacgaactcatatttatttgtcatgtatacacacacactatgatgcaatagtttttctttaaaaattaaggattcgaatatggtaaaatatattacgaaacatattattttttatttaaaattgcttatattttattattttatttttcttattttttaatgtagctgatataatatatatatatatatatgaataagttatatacgtacacatatataagttatttttgcttgccattgatcatttttttgttctgctaaaaaaaagacatttattttttaatcctccattttttatttttttttaaaaaggcattctaagatgattttttcaaaagtctaaattcaaagacaattttttcaaaaccgtcttcgaatcctctttttatatttttttttaaaaaaaacacaaatctaagatggttctttgcaaaaaccgtcttagaaagtctacattctaagacggttctttaaaaaaatcgtctttgaatcctctttttatatattcttttaaaaaacacaaatctaagacggttctttgcaaaaccgtcttagaaagtttacattctaagacgattcttttaaaaaaccgtctttgtaaaaccatcttaaaaagtttacttttcaagacggttttctgaaaaaatcgtcttagaatcctcaatttttttatatttttaaaacaaaaaaatatatttttagacgattttatcttgaaccgatgtagaaagacatagtttttaagacggtttataaatcgtcgtggaaagtgtcgacttttcacgacgttggcttcaaagacggttgaataatcgatgttaaatggcttaaacaaccgtcgtaaaaggccctttttatatagtagtgttaattccatttggtgcttatatataacattttgaacttcaaaatacaaatgtattattatttaatattcttttttttttcaaatgaatggcagattgatcactcggtagtggagagttttgaagcaggaggaaagacaaacattttgttccgggtctatcctgagctagcaatgatgaaccaagcgcacttgtttgtgttcaacaatggtattgaaccaatcgtagtggaaaacctcaagggcttggagcatgatatttgctgatataaaatgatcagcaagaagtaattgcagttcaagttagttaggtggttatccagggtgggtggatctcagacatatcattagttagattttaattcttgttggttagttacccatgtaaacagtgaaataatttctatataaataccattatgcaataagaatcaacaacaattccattttttcttcctcttcctcttagtgacttgtccttcctattgaacaacaagagaaaagacattgctatttgaaggcaaggattccataagaaaaatacgagttctagcagttccataagcttctccaagacatttaagaaagcaaattacataatattatccactctgctatttaatcacattcttagcacaggtacaatttggaataattctcaaatatttcaatgtcacgaaaacatattagtaatatttattcatacttgacgacatttttttaaatatcacccaaagcttttagtaaaatttttatcaagtattagaccaaaaaatgttactgaatatcacatgtgaggtagagaaaactcaagtgataaaacttagagaatatgagcataatgccgctaaaaacaatataatttttttaaacaatatttgacacttgttaggattttgattcttgtcaaaatacttatactatttgattcattaataatatctttgactgattgaataaaaaaatcttcttatttaataataattaatgctatactccttttctgaacgttacttattttattaataatatcatatatgtacttgtcacattatatttccttatagtctatactatctctccaagcaattctctattttaaggctgaaagaatcggaagctccataaccaaagtgcacttgatttcaatggataatcaagtttaagaaccggaagctccacaaccaaagtttaaaaattactttttttaaatttgacttttagtccctaaacaaaaaattggctaaacaaggtccctcaacttttatacattaaggtttttattttctaaaattttgaaaaattaagtttttagtcccttaaatctcattaaaataaataaaaatagtgagttcaaacttttatttaaggattaaaaactacattttaaaagtttagagatctcgactagtcgtcaaacaaaaatctccatggaaaaaattgagggatcttgagaagtcaaacttttgtttagaaactaataaagtcacatttaaaaaaagtttaaggaccttaaccagacaaacttttgtttatgaactgaaaactgaatttcaaaaagtttaaggattaaaaacttaattaaccttaagataaaatttggcaacgatagaaaacttaagagcagggggttaaaattatatataaaattaggggtgtacaaaataacaataatatatatatatatatatatatgtatttccttaaaagttacgtagtgccatagaataaaaaaaaaaacctcaaaatgctgtcatcaaaaattgcttctggtgacaacaacattggttagagaggaaattagtagtggagaaactgagaggtaatgttacaatgtggaaggtgcaccataatattaccaaaatgagatcaatttgatggttattatttatagtctaggtcatggttttaaattgcggttgcaatgagccataaaatctttctgttttgggcaattataattgtgatgtgtttgtggagtatcaaaatatatcttaatgttgcggtcacaattgcgattgcagaacgcaatttaaaaccatggtctaggttgtccatagtctttttctgaattttatcaccatcttttaattaggatatataagaaaactgaacatgtaacctgatctagagtcataagtgcctaccatatcaccacaaatccacaattgttgacccaatcaacacaaatccacactattaatgttgccccaatcaacagttacaaccaaatgccgtatgattccttgatgataactggtaagaaattaaaaattcattttaataatagccatatagaatctgacgttagaattttgtaatacaaaatttgatgtttaactttttaaaattttaaacaatttccctattattctttaatgatatgatcgatattagtatttttttgaaaattaggacaagagtttatatcatttttaacgactgccttctttattgttagatattttagaaacttaatttaagtgtttacaagaaaacaaaaatcttcaaacaaagtgagttctttttcatcgtagctaaatctacgtcgagcatcataaacaaattaaacaaaccagtatatatctataaattctgttggttcgtccaaccttaattatcacattaacacagaaaatgcatgaacaacacacaagtcaacaatttccgataacattcatccacatagacttcattttcatacaataatgtctctcaaattcttttatatttggacagtttattaatgacactttttctttactctagacaaacaggaaataatgagtacctagagcaaattcctaataacggcccttgccacattcgccacatcacgcacaccattattcacaggggtgagtggtgatttcccattgaagccatcctcacaaaaaaaagcctgaacagcacaatcacttaccgcattttctgcaaatttggggtctcccctcacagccctaatggcttgtggtatatcatctatcaaaatccctttgtaatcctcagcacattcacttaaggctttcttattcccaccccgcttaagaagttggttgatatttttctcggcttcagttgcttttgctttgatcacatcgaccaaaatcaatgcgaggcctgcaactgaagacaaagattaggatttggggttctcttgcaaatgtactctatgagtttcacatcgtttggttgcaacactctgcagttacatgctgacattgaaatgatagccacaacaagaatgctgcaaattatagagaggtgcttcaagttcagcatctttgttagaataagatggatgatatatagaagcctcaaaatttgaagaagtagttggggaatagaaattgaaatcaagtgcactttggttgtggagcttcctgttctttcagctttaaatagagaattgctcggagagatagtcatcaacgagaaggaaatataatttaaaaagtcaatgatattattaataaaataagtaatgcgcagaaaaggagtatagcattaattattattaaatactaatattaaataagaagattttttaatcaatcagtttcgaagatatcattaatgaatcaaatagtttaagtattttgactagaatctaattaatgacaagtgtcaattatagtttaaaaatattatgttgttttattttccatggatctaaccgtcagtaattatcgacagatatatatttctgtgagaaattaccgtcggatattttcatgggaaattaccgtcggatattttggtggaaaatttttcatggatatatttatggataattaccgacggaaaatctctcagtaattttactccagatattctttatttctttatttcatttttcatttttattatttaacatccataatttaagaatttattttttctttatattatttaacgtcattatttaaattaacacatacatgtaattaacgaaatactcaaattcctaaatccaaaacaaatggtaaaacaaattcacttaaattcaaaatatacttgcctccaacacaaatgatggtttgaatactcgtcaagatctagctgagatgagtatacatgatcagttacatccaaggtctgatggtaagaaaaaatacttgtctccagtatgtcacactttgtcaagaaaggagaaaacaagtttctgtcagtgtctacgccgtatcaaagtgtcacagggatactcttcaaatattaagagctttgtgcagctgaaagatctgaaactagttggcttaaagtctcatgattgccatgtcttaatgcaacaactgttagccgtggcaattcgtgatattttgcctaacaaattaaggcatgccataacttgccggtgttttttcttcaatgccgtttgtagcaaagtcgtcaaccctagaaagttatatgacttggaagacaaggctacaattatctcgtgtcagttggagatgtatttttctctttcatttttcgacatcatggttcactgaattgttcatctggtcagaaaaattaaattttgtggtctcgtttatttatgatggatgtacccgattaagggatacatgaagatcttaaaaggtttacaaagaatctacaccatcctgaagcattcattgtggaaatgtatattgcagaagaagttattgaattttgttcagaggacattgaaaagggtaaggcttttgggcttcccgagtctcagcatgaggagagagtgggaggtaagggttcatgagggttgcatgtcataaatccagctctagagaaattgcaacaaactcatttatatatactaaataacagtaatgaagtcctgtcatacatagttcatcacaaagccttagtcaacgaaagtaacctaaaaatgaccaataataggttgttcaaagaacataacaagactttcctggattagtttaaagatacaatctttggtgatgataatgcctctgaaacattaaggaagttaacaaatgggcctcaaagaaatgttagaagttggtagggatacaatattaataagtattcattctacaccaaagaacaagatgacaaaagcataattcaaaatggtagggttggtcttagggctgaatcctaacacttttctattgtacatgaccacaatccccgtttggcatctatgccttactttggagtcattgatgaaatatgggagcttaattgtgttaaatttgttaatttgagggggagctacatgaaggttttggagaatcaaatacatgaagttggacattttggctttcaacatgagcttgaagtctgaagaatgaaagtttgtgatttaatgtaaaaggattgaaagcactatggtgatccaagctttgcatccatatcattcatacacatacctagcattgcatcatataaattttatagaattgatttgaaactgaagaaaaagcctaacattttggaaaaataagttcatgactgttttaatcgattattgcatcaaaagaatcgattattttgttcataagcattctggaaaatcaaacatgaacactttaatcgattaccctatcggattaatcgattacacgaagctcagcatacttaggatttggccttgtgactgttttaatcgattaccataatgtcgtaatcgattacatgcttgtttgaaaaatcagtcactnnnnnnnnnnnnnnnnnnnnnnnnnnnnnnnnnnnnnnnnnnnnnnnnnnnnnnnnnnnnnnnnnnnnnnnnnnnnnnnnnnnnnnnnnnnnnnnnnnnnnnnnnnnnnnnnnnnnnnnnnnnnnnnnnnnnnnnnnnnnnnnnnnnnnnnnnnnnnnnnnnnnnnnnnnnnnnnnnnnnnnnnnnnnnnnnnnnnnnnnnnnnnnnnnnnnnnnnnnnnnnnnnnnnnnnnnnnnnnnnnnnnnnnnnnnnnnnnnnnnnnnnnnnnnnnnnnnnnnnnnnnnnnnnnnnnnnnnnnnnnnnnnnnnnnnnnnnnnnnnnnnnnnnnnnnnnnnnnnnnnnnnnnnnnnnnnnnnnnnnnnnnnnnnnnnnnnnnnnnnnnnnnnnnnnnnnnnnnnnnnnnnnnnnnnnnnnnnnnnnnnnnnnnnnnnnnnnnnnnnnnnnnnnnnnnnnnnnnnnnnnnnnnnnnnnnnnnnnnnnnnnnnnnnnnnnnnnnnnnnnnnnnnnnnnnnnnnnnnnnnnnnnnnnnnnnnnnnnnnnnnnnnnnnnnnnnnnnnnnnnnnnnnnnnnnnnnnnnnnnnnnnnnnnnnnnnnnnnnnnnnnnnnnnnnnnnnnnnnnnnnnnnnnnnnnnnnnnnnnnnnnnnnnnnnnnnnnnnnnnnnnnnnnnnnnnnnnnnnnnnnnnnnnnnnnnnnnnnnnnnnnnnnnnnnnnnnnnnnnnnnnnnnnnnnnnnnnnnnnnnnnnnnnnnnnnnnnnnnnnnnnnnnnnnnnnnnnnnnnnnnnnnnnnnnnnnnnnnnnnnnnnnnnnnnnnnnnnnnnnnnnnnnnnnnnnnnnnnnnnnnnnnnnnnnnnnnnnnnnnnnnnnnnnnnnnnnnnnnnnnnnnnnnnnnnnnnnnnnnnnnnnnnnnnnnnnnnnnnnnnnnnnnnnnnnnnnnnnnnnnnnnnnnnnnnnnnnnnnnnnnnnnnnnnnnnnnnnnnnnnnnnnnnnnnnnnnnnnnnnnnnnnnnnnnnnnnnnnnnnnnnnnnnnnnnnnnnnnnnnnnnnnnnnnnnnnnnnnnnnnnnnnnnnnnnnnnnnnnnnnnnnnnnnnnnnnnnnnnnnnnnnnnnnnnnnnnnnnnnnnnnnnnnnnnnnnnnnnnnnnnnnnnnnnnnnnnnnnnnnnnnnnnnnnnnnnnnnnnnnnnnnnnnnnnnnnnnnnnnnnnnnnnnnnnnnnnnnnnnnnnnnnnnnnnnnnnnnnnnnnnnnnnnnnnnnnnnnnnnnnnnnnnnnnnnnnnnnnnnnnnnnnnnnnnnnnnnnnnnnnnnnnnnnnnnnnnnnnnnnnnnnnnnnnnnnnnnnnnnnnnnnnnnnnnnnnnnnnnnnnnnnnnnnnnnnnnnnnnnnnnnnnnnnnnnnnnnnnnnnnnnnnnnnnnnnnnnnnnnnnnnnnnnnnnnnnnnnnnnnnnnnnnnnnnnnnnnnnnnnnnnnnnnnnnnnnnnnnnnnnnnnnnnnnnnnnnnnnnnnnnnnnnnnnnnnnnnnnnnnnnnnnnnnnnnnnnnnnnnnnnnnnnnnnnnnnnnnnnnnnnnnnnnnnnnnnnnnnnnnnnnnnnnnnnnnnnnnnnnnnnnnnnnnnnnnnnnnnnnnnnnnnnnnnnnnnnnnnnnnnnnnnnnnnnnnnnnnnnnnnnnnnnnnnnnnnnnnnnnnnnnnnnnnnnnnnnnnnnnnnnnnnnnnnnnnnnnnnnnnnnnnnnnnnnnnnnnnnnnnnnnnnnnnnnnnnnnnnnnnnnnnnnnnnnnnnnnnnnnnnnnnnnnnnnnnnnnnnnnnnnnnnnnnnnnnnnnnnnnnnnnnnnnnnnnnnnnnnnnnnnnnnnnnnnnnnnnnnnnnnnnnnnnnnnnnnnnnnnnnnnnnnnnnnnnnnnnnnnnnnnnnnnnnnnnnnnnnnnnnnnnnnnnnnnnnnnnnnnnnnnnnnnnnnnnnnnnnnnnnnnnnnnnnnnnnnnnnnnnnnnnnnnnnnnnnnnnnnnnnnnnnnnnnnnnnnnnnnnnnnnnnnnnnnnnnnnnnnnnnnnnnnnnnnnnnnnnnnnnnnnnnnnnnnnnnnnnnnnnnnnnnnnnnnnnnnnnnnnnnnnnnnnnnnnnnnnnnnnnnnnnnnnnnnnnnnnnnnnnnnnnnnnnnnnnnnnnnnnnnnnnnnnnnnnnnnnnnnnnnnnnnnnnnnnnnnnnnnnnnnnnnnnnnnnnnnnnnnnnnnnnnnnnnnnnnnnnnnnnnnnnnnnnnnnnnnnnnnnnnnnnnnnnnnnnnnnnnnnnnnnnnnnnnnnnnnnnnnnnnnnnnnnnnnnnnnnnnnnnnnnnnnnnnnnnnnnnnnnnnnnnnnnnnnnnnnnnnnnnnnnnnnnnnnnnnnnnnnnnnnnnnnnnnnnnnnnnnnnnnnnnnnnnnnnnnnnnnnnnnnnnnnnnnnnnnnnnnnnnnnnnnnnnnnnnnnnnnnnnnnnnnnnnnnnnnnnnnnnnnnnnnnnnnnnnnnnnnnnnnnnnnnnnnnnnnnnnnnnnnnnnnnnnnnnnnnnnnnnnnnnnnnnnnnnnnnnnnnnnnnnnnnnnnnnnnnnnnnnnnnnnnnnnnnnnnnnnnnnnnnnnnnnnnnnnnnnnnnnnnnnnnnnnnnnnnnnnnnnnnnnnnnnnnnnnnnnnnnnnnnnnnnnnnnnnnnnnnnnnnnnnnnnnnnnnnnnnnnnnnnnnnnnnnnnnnnnnnnnnnnnnnnnnnnnnnnnnnnnnnnnnnnnnnnnnnnnnnnnnnnnnnnnnnnnnnnnnnnnnnnnnnnnnnnnnnnnnnnnnnnnnnnnnnnnnnnnnnnnnnnnnnnnnnnnnnnnnnnnnnnnnnnnnnnnnnnnnnnnnnnnnnnnnnnnnnnnnnnnnnnnnnnnnnnnnnnnnnnnnnnnnnnnnnnnnnnnnnnnnnnnnnnnnnnnnnnnnnnnnnnnnnnnnnnnnnnnnnnnnnnnnnnnnnnnnnnnnnnnnnnnnnnnnnnnnnnnnnnnnnnnnnnnnnnnnnnnnnnnnnnnnnnnnnnnnnnnnnnnnnnnnnnnnnnnnnnnnnnnnnnnnnnnnnnnnnnnnnnnnnnnnnnnnnnnnnnnnnnnnnnnnnnnnnnnnnnnnnnnnnnnnnnnnnnnnnnnnnnnnnnnnnnnnnnnnnnnnnnnnnnnnnnnnnnnnnnnnnnnnnnnnnnnnnnnnnnnnnnnnnnnnnnnnnnnnnnnnnnnnnnnnnnnnnnnnnnnnnnnnnnnnnnnnnnnnnnnnnnnnnnnnnnnnnnnnnnnnnnnnnnnnnnnnnnnnnnnnnnnnnnnnnnnnnnnnnnnnnnnnnnnnnnnnnnnnnnnnnnnnnnnnnnnnnnnnnnnnnnnnnnnnnnnnnnnnnnnnnnnnnnnnnnnnnnnnnnnnnnnnnnnnnnnnnnnnnnnnnnnnnnnnnnnnnnnnnnnnnnnnnnnnnnnnnnnnnnnnnnnnnnnnnnnnnnnnnnnnnnnnnnnnnnnnnnnnnnnnnnnnnnnnnnnnnnnnnnnnnnnnnnnnnnnnnnnnnnnnnnnnnnnnnnnnnnnnnnnnnnnnnnnnnnnnnnnnnnnnnnnnnnnnnnnnnnnnnnnnnnnnnnnnnnnnnnnnnnnnnnnnnnnnnnnnnnnnnnnnnnnnnnnnnnnnnnnnnnnnnnnnnnnnnnnnnnnnnnnnnnnnnnnnnnnnnnnnnnnnnnnnnnnnnnnnnnnnnnnnnnnnnnnnnnnnnnnnnnnnnnnnnnnnnnnnnnnnnnnnnnnnnnnnnnnnnnnnnnnnnnnnnnnnnnnnnnnnnnnnnnnnnnnnnnnnnnnnnnnnnnnnnnnnnnnnnnnnnnnnnnnnnnnnnnnnnnnnnnnnnnnnnnnnnnnnnnnnnnnnnnnnnnnnnnnnnnnnnnnnnnnnnnnnnnnnnnnnnnnnnnnnnnnnnnnnnnnnnnnnnnnnnnnnnnnnnnnnnnnnnnnnnnnnnnnnnnnnnnnnnnnnnnnnnnnnnnnnnnnnnnnnnnnnnnnnnnnnnnnnnnnnnnnnnnnnnnnnnnnnnnnnnnnnnnnnnnnnnnnnnnnnnnnnnnnnnnnnnnnnnnnnnnnnnnnnnnnnnnnnnnnnnnnnnnnnnnnnnnnnnnnnnnnnnnnnnnnnnnnnnnnnnnnnnnnnnnnnnnnnnnnnnnnnnnnnnnnnnnnnnnnnnnnnnnnnnnnnnnnnnnnnnnnnnnnnnnnnnnnnnnnnnnnnnnnnnnnnnnnnnnnnnnnnnnnnnnnnnnnnnnnnnnnnnnnnnnnnnnnnnnnnnnnnnnnnnnnnnnnnnnnnnnnnnnnnnnnnnnnnnnnnnnnnnnnnnnnnnnnnnnnnnnnnnnnnnnnnnnnnnnnnnnnnnnnnnnnnnnnnnnnnnnnnnnnnnnnnnnnnnnnnnnnnnnnnnnnnnnnnnnnnnnnnnnnnnnnnnnnnnnnnnnnnnnnnnnnnnnnnnnnnnnnnnnnnnnnnnnnnnnnnnnnnnnnnnnnnnnnnnnnnnnnnnnnnnnnnnnnnnnnnnnnnnnnnnnnnnnnnnnnnnnnnnnnnnnnnnnnnnnnnnnnnnnnnnnnnnnnnnnnnnnnnnnnnnnnnnnnnnnnnnnnnnnnnnnnnnnnnnnnnnnnnnnnnnnnnnnnnnnnnnnnnnnnnnnnnnnnnnnnnnnnnnnnnnnnnnnnnnnnnnnnnnnnnnnnnnnnnnnnnnnnnnnnnnnnnnnnnnnnnnnnnnnnnnnnnnnnnnnnnnnnnnnnnnnnnnnnnnnnnnnnnnnnnnnnnnnnnnnnnnnnnnnnnnnnnnnnnnnnnnnnnnnnnnnnnnnnnnnnnnnnnnnnnnnnnnnnnnnnnnnnnnnnnnnnnnnnnnnnnnnnnnnnnnnnnnnnnnnnnnnnnnnnnnnnnnnnnnnnnnnnnnnnnnnnnnnnnnnnnnnnnnnnnnnnnnnnnnnnnnnnnnnnnnnnnnnnnnnnnnnnnnnnnnnnnnnnnnnnnnnnnnnnnnnnnnnnnnnnnnnnnnnnnnnnnnnnnnnnnnnnnnnnnnnnnnnnnnnnnnnnnnnnnnnnnnnnnnnnnnnnnnnnnnnnnnnnnnnnnnnnnnnnnnnnnnnnnnnnnnnnnnnnnnnnnnnnnnnnnnnnnnnnnnnnnnnnnnnnnnnnnnnnnnnnnnnnnnnnnnnnnnnnnnnnnnnnnnnnnnnnnnnnnnnnnnnnnnnnnnnnnnnnnnnnnnnnnnnnnnnnnnnnnnnnnnnnnnnnnnnnnnnnnnnnnnnnnnnnnnnnnnnnnnnnnnnnnnnnnnnnnnnnnnnnnnnnnnnnnnnnnnnnnnnnnnnnnnnnnnnnnnnnnnnnnnnnnnnnnnnnnnnnnnnnnnnnnnnnnnnnnnnnnnnnnnnnnnnnnnnnnnnnnnnnnnnnnnnnnnnnnnnnnnnnnnnnnnnnnnnnnnnnnnnnnnnnnnnnnnnnnnnnnnnnnnnnnnnnnnnnnnnnnnnnnnnnnnnnnnnnnnnnnnnnnnnnnnnnnnnnnnnnnnnnnnnnnnnnnnnnnnnnnnnnnnnnnnnnnnnnnnnnnnnnnnnnnnnnnnnnnnnnnnnnnnnnnnnnnnnnnnnnnnnnnnnnnnnnnnnnnnnnnnnnnnnnnnnnnnnnnnnnnnnnnnnnnnnnnnnnnnnnnnnnnnnnnnnnnnnnnnnnnnnnnnnnnnnnnnnnnnnnnnnnnnnnnnnnnnnnnnnnnnnnnnnnnnnnnnnnnnnnnnnnnnnnnnnnnnnnnnnnnnnnnnnnnnnnnnnnnnnnnnnnnnnnnnnnnnnnnnnnnnnnnnnnnnnnnnnnnnnnnnnnnnnnnnnnnnnnnnnnnnnnnnnnnnnnnnnnnnnnnnnnnnnnnnnnnnnnnnnnnnnnnnnnnnnnnnnnnnnnnnnnnnnnnnnnnnnnnnnnnnnnnnnnnnnnnnnnnnnnnnnnnnnnnnnnnnnnnnnnnnnnnnnnnnnnnnnnnnnnnnnnnnnnnnnnnnnnnnnnnnnnnnnnnnnnnnnnnnnnnnnnnnnnnnnnnnnnnnnnnnnnnnnnnnnnnnnnnnnnnnnnnnnnnnnnnnnnnnnnnnnnnnnnnnnnnnnnnnnnnnnnnnnnnnnnnnnnnnnnnnnnnnnnnnnnnnnnnnnnnnnnnnnnnnnnnnnnnnnnnnnnnnnnnnnnnnnnnnnnnnnnnnnnnnnnnnnnnnnnnnnnnnnnnnnnnnnnnnnnnnnnnnnnnnnnnnnnnnnnnnnnnnnnnnnnnnnnnnnnnnnnnnnnnnnnnnnnnnnnnnnnnnnnnnnnnnnnnnnnnnnnnnnnnnnnnnnnnnnnnnnnnnnnnnnnnnnnnnnnnnnnnnnnnnnnnnnnnnnnnnnnnnnnnnnnnnnnnnnnnnnnnnnnnnnnnnnnnnnnnnnnnnnnnnnnnnnnnnnnnnnnnnnnnnnnnnnnnnnnnnnnnnnnnnnnnnnnnnnnnnnnnnnnnnnnnnnnnnnnnnnnnnnnnnnnnnnnnnnnnnnnnnnnnnnnnnnnnnnnnnnnnnnnnnnnnnnnnnnnnnnnnnnnnnnnnnnnnnnnnnnnnnnnnnnnnnnnnnnnnnnnnnnnnnnnnnnnnnnnnnnnnnnnnnnnnnnnnnnnnnnnnnnnnnnnnnnnnnnnnnnnnnnnnnnnnnnnnnnnnnnnnnnnnnnnnnnnnnnnnnnnnnnnnnnnnnnnnnnnnnnnnnnnnnnnnnnnnnnnnnnnnnnnnnnnnnnnnnnnnnnnnnnnnnnnnnnnnnnnnnnnnnnnnnnnnnnnnnnnnnnnnnnnnnnnnnnnnnnnnnnnnnnnnnnnnnnnnnnnnnnnnnnnnnnnnnnnnnnnnnnnnnnnnnnnnnnnnnnnnnnnnnnnnnnnnnnnnnnnnnnnnnnnnnnnnnnnnnnnnnnnnnnnnnnnnnnnnnnnnnnnnnnnnnnnnnnnnnnnnnnnnnnnnnnnnnnnnnnnnnnnnnnnnnnnnnnnnnnnnnnnnnnnnnnnnnnnnnnnnnnnnnnnnnnnnnnnnnnnnnnnnnnnnnnnnnnnnnnnnnnnnnnnnnnnnnnnnnnnnnnnnnnnnnnnnnnnnnnnnnnnnnnnnnnnnnnnnnnnnnnnnnnnnnnnnnnnnnnnnnnnnnnnnnnnnnnnnnnnnnnnnnnnnnnnnnnnnnnnnnnnnnnnnnnnnnnnnnnnnnnnnnnnnnnnnnnnnnnnnnnnnnnnnnnnnnnnnnnnnnnnnnnnnnnnnnnnnnnnnnnnnnnnnnnnnnnnnnnnnnnnnnnnnnnnnnnnnnnnnnnnnnnnnnnnnnnnnnnnnnnnnnnnnnnnnnnnnnnnnnnnnnnnnnnnnnnnnnnnnnnnnnnnnnnnnnnnnnnnnnnnnnnnnnnnnnnnnnnnnnnnnnnnnnnnnnnnnnnnnnnnnnnnnnnnnnnnnnnnnnnnnnnnnnnnnnnnnnnnnnnnnnnnnnnnnnnnnnnnnnnnnnnnnnnnnnnnnnnnnnnnnnnnnnnnnnnnnnnnnnnnnnnnnnnnnnnnnnnnnnnnnnnnnnnnnnnnnnnnnnnnnnnnnnnnnnnnnnnnnnnnnnnnnnnnnnnnnnnnnnnnnnnnnnnnnnnnnnnnnnnnnnnnnnnnnnnnnnnnnnnnnnnnnnnnnnnnnnnnnnnnnnnnnnnnnnnnnnnnnnnnnnnnnnnnnnnnnnnnnnnnnnnnnnnnnnnnnnnnnnnnnnnnnnnnnnnnnnnnnnnnnnnnnnnnnnnnnnnnnnnnnnnnnnnnnnnnnnnnnnnnnnnnnnnnnnnnnnnnnntgattaattcttgtgtgaactctatttctgtgtgattaatcttgtagcataacaagtcctgaattgatattggataaggatattcctttggttttgtgataaagatcctaaggactataaaattctgatttgaaaattactttttcttcaaagaaagttttaatttaccaaggttaaccaattcaccccccctcttggttaagtgtgagtgttccttatttttaacaaaattaactgtgtagtgttttcaagtgcaagtgggttgatagcaatatcggtgtgcaaactaatgattcgggatttactttggtagatcttaagaagctagattatcaaaatgtgtctttcatcatggcagaacaatctaaacaagctaaacaagtgttttatgttcaagatccttgtgatgaaaggtggttagtggttctacatggaataaccatcggtattaaagttggagatatttaacccttgatacttatctcactactttctcgacacaaatgcctaacatcaacgaagaagaagaagaagttgacgacgttcatgcaaatcgtaatgatcatgttgaaggataattaattaacatcatttaatgtaatatttatttatatttacttgtttccacatttagaatttcataacttactttacttgtcacttaactttaattaatgttgtttattaataggcacgtgactacaccacccctcctcctcctgagtcaacaccttcgtcgtctacattgaagaagacaagaaaagcaacacggcttaggtcattggctaccaatcctatcgatgtcgagagactagtggttcatgtggatcctgccactgggaaggctaatggtccccaccaaaagaaattgaggacatagttggggatcatgactccggacaaggtggatgtcacgattggtgattggaatgaagttcttgcagctcaaaaatatttgatttggaaggacattcaggtattacaactaaatgttcaatgtcaatgtaattggttgtacaatcttgaattaaaatgttttggtaactgttaaatgtttttttttttgtatcccaggctaaatttgatataccaaaagcgtccgaccaaaggacggagaagaaaatcctttagacagtaggcgagcaatggaggaagtttaagtcatattttcactccaaatggactctggtacaaggcaaggaggacgacgatgacactatttatgaaaaatatggtattagtaaagaaaagtggcaccaattttgtcagagtcgtagagccgctttgtgggaggttagttgacttccattgtttatcattttgacaactatgcagtattttcaagtgcattttgttgacaaacttttgtgtaattttgacaggatgttagaaagaaggataaggccatccaaaaacaaaacaatgtccctcacgtgttgtctcgtgggggttatgatttgttagaacaaaagataatggatgaaaaacaaaagcaacgattggaggaagcagcccaatccaggagcatggaaacaatcgatcatccttcatctcctattagatgacacgtgaagtggaagatgactcgcacaaaaaaaaataggagacatgacatatgaggcggcgcgtgaaattgcacaaaggattgtaagttaattatttatttcaatggtcattaattaaatttgtaaattcgtgtaatgttttgttcattacaagaatcccatgaagagtaggttacacagggtagctttgtcgcccatggacatcaggacgtattgactgctatcattgggtgaccagagccctctagttgtgtttgtgctactagagcaggtgtgatcattagacaatactttggactgacttcctcaagttgctggacgtctacaccaatgaagtcggaagacttggatgaactgaagaagaatatcaaggacgagctgaagcatttgataactgactcgtcaactaattttgttattcaaccagatgcgatcccagatgcaatcccagggattcatactacctattgaggttgagattggtccttctactacccgtgtcagcacaaaggaaattgatccctcgaggcaggatccagacacatgtacattagacaggtgtggattgtatgttgaagacaatcctccccatctggttgccttaggaatagtttaggaggggtcaacaaccatccacaacctcccttaatttggccaatgatcaagtgaaggtgggtgccgaggaagttcgagatgctgatgctttcgtccctatacccgctcaagagtttcagctacttggaaaggtatttaacaccttccttgcgtggatgacacatcttgtacatcctatattagatcacattgatcatccccctgcttttcctttgacccatgcaagtgtcgtgggatactactttgtttggggtgtataatgaggacttccccttgtacataaagcatgaagatatttatgaaataatacacggtaatcaatgtctgaacatcttcattttaaaactatggattatgtaagtcactttacattacagcccattacataactaattgttttattttgatgcataatttactttatttttaaaaaataggcatatgaatgacttaagtttgcaatctgataatgcctcggtgtatggattgcttaagccaagtccatacaaaaatctgaccaattgcaatatgaatccaacgactatattaagaaatggatgcaaagttcacagaaacatgtctaccagcgtagtagaatgggtaagttggagaggtacctttactcttgattcagcttctttgggaaaaattcttcatgcatgtttgccaagctaaaaggcatgtttcgcacaattgattaggatggttgatgtgaggcatccccttcaccatcttctcatctcccaaggtcttgagtgctccaaaattcaagtggtcaatcttcatatgccaacaccatgcttcatcttttatgttagcctttaagcattttgtttcatcggtcttaatgctcaaagtgaacattatatttcttgacataaacaccttgtcaatcaaattagagttttgatctttaagccacaaacaattacctttcataaggactgcataccccttcttaacaaaatgtcccaaactcaaaatattactttttagtttaggaacatttatatgttacctttctcttggattttcactttttaagaatcaccaaatgaaacattttccttcaccttttcttcaggctccacaattttctccttgtaaccgcgcatgtgattacttgctccattgtcaagataccacaagcacttatcatcttcattattaagtgacaataatagtgttggctcttcatcttcttctttctcaccaacaatattggtcatttcttcaacattggttcgacactcccaagcaaaatgaccatacttatgatatcatacctcttttcatttgttcttccaaaattacctctacctcttcctcttccacgacttctagtagttgttagaatatgatgaagaatcaagttgaagaagatcatgaagaatcaagtttaggatgatcacaagttttgattttacatgcccactcaaattgatggcatatgtattttgttcaaagcttggttcaagaagttaaaacctcttatttctcacataggttgattaagtcatgcatacattcattcattaattcatgactaagtcacatgaaaaacattaaatcaattggtatgacattaaagcattaagattttcataaaaagtatttttcactgttttaatcgattaccaatatgatataatcaattaaatacatgtaagcagaactgcatattgtcacttgaacacttaaatcggttaccaataattcataatcgattatattagtttgactatgttagattcgttctgtgataatcgattacttcacggaataatcgattatcggtgtatctgcataatttttagaagcatttttatctggtttaatcgattaccaagttgttgtaatcgattaaatatgcattaatgagtttttcacacttcctgtgataatcgattatttgagacattaatcgattacactagtgtatcagaaaaccctgacctcctggaataatcgattacgagatgagttaatcgattatttattcttgagattttttccagatttctgatgaacactttaatcgattattttataattttaatcgattacatgagttaaaataatcgattattcttacggaataattgattacaggtagttaattctgttttttataaatagaataagctcattctgtttaagagacttctgagtttttgaacaagccttgtgaaaatcactttctaagtattctaaagtcaccaaggcacattagaaacaaaaattcttagtagactcaagaatcatgaagactttcatttgttgagtcatatattccatgtgaagtttgtgctcaagcattttggttaaaagatttcaccaagaaagatcatggcattcattcgcagtctggtttgatcatttaaattcgttcattgcactgaggatattgaggtgatatctttcttgaatcaattttattgttgtattgattaaaattttgttattgtttgttcatataacaaattgtaatctttaaagcattgctagataggtttctagtgggtagaacaaagaggggatctctagttcttagattttttgaaaagtctataggtttagattttgaattttaactagggagggtaagagagatctgtgtttgcttgtaaagatattatatttgttatagtggaaactctaatcaaggatgattagaagtaaaactggatgtagcctccggggttgagaggtgaaccagtataaatcttgtgtgtaattgtatatttctgttcgtattcatattgttcttgaagtattttgcttgtttgtatcacaagattgattgttgctcaagagtggtctgattgagataaaagttgtttttaaaagttagatttcttaattggtttaagatacgatccttctttcaaagacttccgttgtgattaaaatttttttaaaatcttaaaaactctgagaaaaaaccaattcacccccctcttggttatttgcataagtgttcattctattttcaactggtatcaagagctagttcttgtaatttgctcaagatctttgcaaattcagtacaatgaatactaatcaaataactttcaaagagggagcctcattgaatagacctcctttgtttgaaaaggaacattttaatttttggaagagtcagatgcaaatctttatccaatcaaacgacccaggagcttggaatagtattgaaaaaggaccttacattccaaccaaaagtgtggataacaaaacaataccaaaagaatgggatgaaatgtcagaaatagaaaagagaatggttcaatatgatttcaaggcaaaaaatatgataacttctactttatcttccgatgaatttttcaggactgttaggtgcaaaagtaccaaagaaatgtgggaattgcttgaagttacacatgaaggaactgaagatgtgaggagatcaagaaagcacactctcattcatgaatatgaaatgttcaaaatgagagatgatgacaacatctcacagcttcaaactagattcacccacattgtgaatcacttgcttggacttggtaaaacctttgatgcagaagaattaaacatcaaaattctcaaatgtctaacaagggattggcaacctaaagtcacagccattaaagagtctaagtatctatctcaaatgtcagtggcagcaatgtttggtaagcttttggaatatgagcttgaattatctcaactaacaaataatgaagatgcagataaaaagcacaaaagcatagctttaaaggctgcaccttcaaagatagttgaagatgatagctcaagtgaagaggaagatgataaaaatgtcaacctcattgttagaaagttttccaaatttctaaggaagaacaagggcagaaagcaaccattccaaaagaaaaagaatggatacaagaacaagaacaacaactcctcctcaatcacttgctttgaatgtgggaagcaaggccatataaaatcagattgtccctcattaaccaagaagccacaagttgagaagaagttaagaagagaagggaagcagaaaaaggctttattgcttggaggataatgaatcaacaagttctgagtcctcatctgagaaagaaattgaagctcacatttgtcttacatccaccatcaatggagattgtgaatcatcaagtacagaatcagaggtaaattctgaatttgatagtgttgttgatgcatttcatgagatgcatttagaagctcaaagactaactaaagcaaacaacaaacttaagagtgatctaaggtggcatgtatccaaacttgctgaattgcaagatgaactttgtaaattgaaggaaaatcatgataaacttctctcaagttacaaagaaattggatgtacatgttcctcagccaactctaaggttgatgatctcaataatgttcaaaaagaatttgaagagtataagctaagtgcagaaaaagaaaacatgtgcttacaaactgaaaatagttatttgattgatttgttgagaaagtattacaaaggtaaatgcaacttagatgagttactaagtgtgcaaaagtttgttggtgatacttatggattgggatataaacatgaagctagaactcaaaacaagcttctgtttgtaccaccaaaacataagaatcaaaggcagcataatcaaacaaatctctatcaaagattcacacatgctaaatcatcaaagaatcttacttgcaattattgtatgcttaaaggtcacacatcatacaagtgctatgctagaaaattttatgttcctaatggtaaatgtatatgggttgagaaaagaaagaaagcaactaaccccctttggacccaacttaaattggggatcctatctctctttctaaaatgacttgtgcagatgtgtcttagagcaaaatcttcaacttggtacctaaatagtggattgtcaagacacatgactggagacatatccatgctaacagatgttgtacttgaagaaaaacgatatgttacttatggagacaacaataaaggtaaaataattgggcaaggaaatattggagacagcttgtctacaaagattaaggatgtgttgtatgttgaagggttgaaacacaatttgctgagtattagtcaattgtgtgacaaaggattgaaagtcaccttcaacaatgaaacttgcttaatacatgacaacaaaagtggcaaagtggcacacattggtaagagaaagggtaatatctatgtcttgactattgaccatgcattcatacataaaactgattgcttgatgagtaaagtgaatgaaacatggttgtggcatagaagaacatctcacataagcatgcatcatcttaacaagttaattagaaaagacctaataattggtctacccaagcttaagtttgagaaggacagaatttgtgaagcatgtcaaagagggaagcaaactaaaaactcttttcaaagtaagaatatgatttctacttctagacctcttgaattgcttcacatggatttgtttggcccttctagaataatgagcttaggaggaaattattatggacttgttatagtggatgactactctagatacacatggacattgttcttaagatccaaaagccaagcattcacagcttttaagaaacttgccaaagttactcaaaatgaaaaaggttgtaatattatttcaattaagagtgaccatggtggtgaattccaaaatgaacactttgaaaagttttgtgaagattttggaattaatcacaatttttcagctccaagaacaccacaacaaaatggtgttgtggagaggaaaaatagatcacaagaagaagaagcaaggactcttctaaatgaaacaaagttacctaagcacttttgggcaaatgctgtaagtacgatttgtataataaccatggttactaaaaaaaaaaaaataataatattttcactgtagcctggcactgatagcgtgggatctggcgctgatagcgtggcattgtagctgaaggccattttcacgatttttggcgctatcagcgccagagtggcgccagtagcgccacagatgctggaaattggcgccaggagcgccaaagtggcgccaagggcgccagatgcactggattttggcgccattaacgccagagtggcgccagtagcgccacagatgttggaaattggcgccaggagcgccaaagtggctctagattttggcgccatcagcgccagagtggcgtgattagcgcggcatgtcggtcaggtctagtatataagggccattttacgaatttttgggccatttttcattttgtccttccttggaacgaccaaacctccattgttgcccaagcttcctagaccttatttctttcaccaaaccacatccttaaagcaccaatcttgttagaaatgtgttgtgagctacaatccttcccttaaatcccttgaaaacccctttaagctgagaatccctttcttaagggaaatccttggaacttgagtttggcgaggaacgactttgattcttggacacctgagctaggagaagttgtccaccagcccttctagtcgccattgaggccgtgagactcatatcactagtggtagtcaccacgaggctaggagagctagttctgagctgagatcaggtaagctcatcgttcttgggaatgtttcccttacttgtgttcaccacacccaagaggatgatggtctgatatgtcatgcctctggatattgtgtaatgttgttagtttgagacatgtatataatggtatgatgatgattgattatggctaaacactgtgatggtgtgatggtttgtattggttatgatgatgatatatgttgtggttatatgagaattctctggccagtagaataatgaactatggaccccttgggaatgtgcccttaagtggatgatcttccttgggacaatccataggcgtccatgtaaatcctgggagaatgtgcccttcattggatgatctttctcaggtattgggcggggaaagtcctgagggaatgtgcctttaattagatgatcttcctcaggcatggatagggagagtcctgagtgaatgtgcctttcagtagatgatctcctcaggtactcaattagaattcctgagagaacgtgcccttttatggatgatctctctcaggcaaagtgtgatgggtacatatgttgttaccctgtactgtgatatgcatgtaatgtgttatatgtgagccatgaaggctggatgtatgaaaaatgtttatttgatattgattatgttgtatgtatgtttgaaagtgaaccagggggagggaaacctccaaggaccctgagtttactgagatcattatctcacccctgttggggctcatgttgcaggtgatgatacaggagtggctgatagatcccaaggcaaaaggcctgagcagagatagtactgttgctaaccctaggcatagatgactgagcatgttggctcacattttgtttattatgcctgtattttgtgccctaaggggataattgtatagttttgtgactcattcaaaggattatgttgtatatgacagaattcactatatatgtatataatgtacttttgatatttgcttcggcttcttaagttttattgtgaatatattgtaaccgctgcaatattctgatatgataataatgttaatacgccgggtgcacacggggtgttacagtttgttatactctcaataggattctcataaggcccattttaaagaaaacaccttatgaaattcataaagggaggaaaccaaatatctctcaccttagggtatttggtagtaaatgctttgttttgaataatggcaaagacaatcttggtaagtttgactcaaaagctgatgaggctatctttctaggatattccttgcaaagtaaggcttatagggtctttaataaaagaactttgtgtgttgaagagtcagttcatattgtatgtgatgaatctaacccttctcaagtagaagttttgagtgataatgatgcagaatacaaagaaagacagcagcacatagaaaccaaaaagctggatgaagatgaaacaaaagaagacacaaatcaagaaacaactacacctaaacacaaggattggagaacctcaagagacctatcgttggacaacattattggtgatgtatcaaagggagtatcaactagatcttccttaagaaatctttgttgcaccatggcttttgtatcacaaattgaacctaataacattgaacaagccttattagatgaacattggttgattgacatgcatgaggaattaaatcaatttaaaagaaacaatgtttgggaacgagtacctagatcttccactcacacacctattggcacaaagtgggtatttaggaacaaactggatgaaagtggcataataattagaaacaaggcatcataattaaagatacaatctttggtgatgataatgcctctgaaacattaaggaagttacaaatgggcctaaaagaaatgttagaagttggcatggatacgatattaataagaatttattctacacgaaagaacaagatgacaagagcaaaattcaaaatggtggggttggtcttagggctgaatcctaacactttgttattgtacatgaccacaatccctgtttgtcctccatgccttactttggagtcattgatgaaatattggagcttaattatatacaaatcattatatgtgttttcaagtgtaagtgggttgataacaatatcggtgtgtgaactaatgattcgggatttactttggtagatcttaagaagctagattatcaaaatgtgtctttcatcatggcagaacaagctaaacaagctaaacaagtgttttatgttcaagatccttgtgaagaaaggtggttttagtggttctacatggaaaagacattggtatcaaagttgaatacatataacccttgatacttatctcactactttctcgatacaaatgcctaacgtcaatggagaagaagaaattgacgacgttcatgctaatcataatgatcatgatgaaggagaattaattaacatcatttaatgtaatctttattttatatttacttgtttccacatttacaatgccataacatactttacttgtcacttaactttaattaatgttgttttttaacaatcacatgactactaagttaattctgtagcacagagctaacctaggtcgactcagagacacaatcaatatggttctagcttcaatttacgaatacagtgaggggagaattttatcaaacagtttgtgtgcgtaagtaaaacttgcaaaaacgtaaactaaaattaaagagcaacacagaaactaacagaattcaaaagaagtaatctaaaacaaaattaaaacatcaatccaattcacctcaccaagcaattcgaatcatcatagttctaagaaatttatcctattgtgaaagttcattcaatctcattagaagcaactcaatcgaactaacccctaaattgattgaaaccacaaccctaactgaaatatcatccaattaatctgtgattaatattcgaaattaggaaatgaatccataacctaatccattttcaaccctaaacgcattcataatcatgaaaacataatagcaattgaagaagaagatgaacattcacataggattcgaaatactaaaccagaactcaaattctcgttgtgcttggattggatccttggattgattgaggatttagccttccatgatcatcatcagtgaaagccccatggaattattgcatgagaatggaagaacaaaaaaaacaaaaatgaagaacaatgaagaacaagcaagaacagtagagggaaaatgaagaacaagggtttgattctaaaaactaaaggaaagaactataaaacttgtttattgaaatgtaaagtgtggtgcccaagtttcactaaagtcactaatatatgtagtgattgagttctgaaaataaaatgggccacaaacaaacccaacaatctaattatttgctatttacaaccatgaaagtcaaattcgcagcccaaaattacaagtgcaggggcgctaacttcgaagcttaaaatgacccgctaaatgatagaattggccccaggatatttctagtaaactcgtagatcttttctttatctttccagggactcctagaatgctccattcggagatcggtagcactctataggccctgcacaagccagatacgtcaagtgagcaaaaatccgaaaatacgcaacaattagcaattaagtccacttacttgcctaggcccaaaacggaattagaataggaaaataaaggttcaaaagaggtcaaataagctaagagtgatagaaaaatattcaactaaaagcactctatcaaaatatcccacacttaaacttttgcactcctgggcaaaactaaaagaaagactaagagaaaaattcaaactaaagtagaccaaaaatttagagaaaggatatgaacaaggcacacatatttttcaatggatgacaacaatgcacaaaagtgagagagatgaaagatggaaaaataatgttgaggtaacaaataatccatgaaaacatgatcacaaagcgcaaagtgaaaaagtagtcaaggttagaatcaagaatgcaccaaggtgatagaattctctcaaagggtggcactcaacctcacatgatgtgtatggcttgtatttacactcaaacaccacatgcaactagcacatccaagcattgacaaacctctcattcattcaacttgaaatacacatgcatcaaaagatcaaaaggactttattaccttgtaatgaatggcttaggaaagggtggataagaaaaggatatttaggctaaagcttaagagaaaagagggacaatggggagcaagtcaacaagataaaagaagggtagaagcaagaagatgaaattagaagaatttacaagggtgaaaatgaactataacaacttttattgcatatattttttttctttgcttgaacttctttttctttgcttatacacaatttttttctacttttcttctttttctctctctttttttttctttgaacttttgctatttgaactctttcttttctttttttcttttcttttctttcaaaacaaaacaaaagacaaacaccccacacttgtttgaaacccactcccaaaacaattccaaagccccttttctccctaaagctagtgtaacatggttttccatcatttttttttagtttttaatgagctaaacaagtaagaaaaggctaaaggctcaaaaagggtgacaatggatatcaacacaaggataggcttatttggctagtggctaaaagaaagaaggcctaaatcatctcaatcaaagcatgtgcaacaaggaatgtcaaaagaggcaaggcaaaacatagagtaatctagcacaagggtgaaatcacacatgaaggaacatattcacaaaggctcaaaaactcacaaggcatagttctaccacacatggctcatcttannnnnnnnnnnnnnnnnnnnnnnnnnnnnnnnnacatgaaaaagtgcctaaattcaataaaaacagcaacaaacaaaaacagacagaaacagacaacaaaaaaaatacagactcaaaaactaaaagagacaaacagaacatagacgggcagataaacagaaaatagacagcaaacagaaaacagaaaataaaagatactgacaaacagacaacaacaaaacataaatagaaaacaacagatagaaaatagaaaacagaaaataaccagaatttcaaaaattttaaggatccttcaccccccatttgaaatgcacattttcctcaatgtaagcatgcaaagaaatgcaacaaagagacaacaaataaaagaagggaaaaggaaactccccaaatgtcattcaagacacgtcttcacacaaaatgggcaggaccaaagagatgtcctccacaagctcttcctccacttgagggctctcatgaaatgctttgagttggtgaccattgaccttgaagactttgccgatagcttcagttttaatctcaactgcaccatggggaaaaacattagtaataacaaaaggtccatcccatctagatcaaagtttaccggaaataagcttaaggcgagaattaaacaataacactttttggccactgtggaactcctttctaagaatcctatagtcatggaatttcttcactctctccttgtaaatcttggagttctcataggcttctaaacgaatctcctcaagctcttgcaactgaagcttcctttgcatacccgcttcatcaaatgccatgttacaactctttaccgcccaataagcacggtgctcaatctccactggaaggtggcatgccttaccgaaaatcaccctatatggagacatccccaaaggtgtgcagtaagtggtcctatgagcccataaagcattctcaagaagcttgctccaatcttttctgtttggttgcaccaccttctgtaacacttgcttgatctctctgttaaaaacctctgcttgcccattagtttggggatgacaagcggtagcaactctatgcacaaccccatacttctgaagcaaggatgcaaatgaccggttacagaagtggctcctctggtcactgataatggctctaggcacaccaaacctgcaaaaaatgttggatctcacaaaatccacaacaactttagaatcattagttctggtggccttagcctcgacccatctagaaacataatcaacagcaagcaaaatatatgaaaagccatgaggaacaggaaatggacccctaaaatcaataccccagacatcaaaaatctcacaaaaaataatgggttgctgaggcatctcatgtctatgtgtaattgtgcctcctgctctctgacattgctcacaaatggtggtaaagtgatgagcatctctaaacaaggnnnnnnnnnnnnnnnnnnnnnnnnnnnnnnnnnnnnnnnnnnnnnnnnnnnnnnnnnnnnnnnnnnnnnnnnnnnnnnnnnnnnnnnnnnnnnnnnnnnnnnnnnnnnnnnnnnnnnnnnnnnnnnnnnnnnnnnnnnnnnnnnnnnnnnnnnnnnnnnnnnnnnnnnnnnnnnnnnnnnnnnnnnnnnnnnnnnnnnnnnnnnnnnnnnnnnnnnnnnnnnnnnnnnnnnnnnnnnnnnnnnnnnnnnnnnnnnnnnnnnnnnnnnnnnnnnnnnnnnnnnnnnnnnnnnnnnnnnnnnnnnnnnnnnnnngcaaaccaaggtgtgacatgtgatgaatgcaaatgcatcaagtgctcatcagaaaaattatcannnnnnnnnnnnnnnnnnnnnnnnnnnnnnnnnnnnnnnnnnnnnnnnnnnnnnnnnnnnnnnnnnnnnnnacaggtatttcaaagctgcatggtcaataaagacaatgatatgggagcaaagcaagtaagatctaaatttatccaaagcaaaaacaatagccaaaagctccttctcagtggtggtgtagttaacttgggctgcatctagagtgcgtgaagcataagcaatgacatgggatagtttaccaactctttgggacaacacagccccaagtgcataattagaggcatcacacatcagctcaaagggaagctcccaatttggcggctgcatggagaggtagtcagcttcctcctcaatccctcaaatgcctctttgcaaggctggtcaaatataaagtctacgtccttttggagaagcttggacaatggcaatgcaatcttattgaaatcctgaatgaatctcctataaaaacctgcatgtccaagaaaggaacgtacttcccacacaaaagcagggtaaggcaaagaggtaatcacctcaattttggccttatcgacctcaatacctctacaagagaccaaatgtcctaggactatacctttatgaaccatgaaatggcatttctcaaagttaagaacaaggttaatactaatacatcggtcaagcactctagagagactatccaaacatgcatcaaaagacgaaccatacacagtgaaatcattcataaatacctccatgcaactctctaacagatcagaaaagatgcttaccatgcacctttggaaggtaccaggtgcgttgcataggccaaaaggcatctgggtgtaagcaaatgtgccaaatggacaagtgaatgtggtcttatgttgatcctctggtgcaatgtggatttgcatgtaaccagaaaaaccatcaagaaagcaataatgtgatttacctgccaacctctctaaaacttgatcaatgaaagggagagggaaatggtccttgcaagtggcctggttgagtctcctgtaatcaatgcaaactcgccaggtgcgttgcatagacctgactttttaggaaccacttggacaggtgaaacccaagtgctatcagagatgggatagatgatccctgcagctagtaacttcatcacttccttcttcaccacatcaagaatagtgggatccagcctcctctggggttgcctcactggtctagaatcatcctccaaaagtatacgatgcatgcagatggaaggattaattccaggaagatcagcaagtgtccatccaatggcctttttgtggcctctcaagacattcatcaacttctcttcatactccagtggcagactactagatatgatgactggaagcttctgagcatcatctaaatatgcatacttgaggtgctcaggtagtgacttcagctccaaggaagggggctgaatagtggaaggtaagggaagactagaagctgaggaaagtgggatagtaggctcagaacttgtatctgtacctggaacacaatcagagtgaagtgcggaggaaatttcctcacaaatgctacacacagcagcagaatcatcacaggtacaattacaagaaccaagatcaaagtcagaaaagtcagaagaaagatcagaaaaatcagaaagcaaataagaaatatatacactatctactgcagcatcaatgatatcaaggagaaaaacagaatgctcctctgcaggatgtctcatagcctaaaaaatgttgaattggacaatgtcatcaccaactccatagaaacagttcctgcatgcacatcaattttagtccttgctgtcattaagaatggtctccctaggatcaatgtgggatcatggttggaagactcattctccatatccaaaatgtaaaaatctgctgggaagatcagatgattaactcgcaccagcacatcttcaataagtccaagtggaattgcagcactcctgttggctaagtggatgacaatatcagtgggtttcatctcaccaaggtgtagtgctctgtaaactgatatgggcatgacattaatggaggctccaagatcacacaaggcctctgcaaaagtaatatctccaatggtgcatgggacagagaaagtgccaggatccttgcacttcggtggcaaggtggatagtgggatggcatcaacagctttcccctatatcagtgcggaaacatttctgcccatcttcacttgctcatttcccttaagcttcctcttgtgggtgcacaaatccttcaagaactttgcatattttggaatctgtttgatggcatccaggaggggaatgttgacttccaccctcctgaaagtctcaagcatatcagaatcaagctccactactttctttgcaggaatggctctagaaggaaaaggtaagggaatctgttttggtgcagaatctgttttggcaccatcaacaacttttttactagcaccagcatcaattttagcaccagcatctggaagttccgtgccactcctcaaggtaatagcacttacattcttcggattaacaactggttgtgctggaaggttaccagaaccttgttgttgcatctgattgacagttgtagctaactgtccaatctgagtctgcaggtcctggatggtggcactgacattttcttcattaaatcctccaaggaaggtccagagctagactgcacaggttgtggaggtgtaggtgtaggtgcaggttgctagaactgtggctgttgtctaaaaggaggaggttggtatttagtggtggcaggctggaaaggttgttgtggaggtctaaagggatgctgttgaggtggaccaggaccatacctcaaatttagatgatctctccaaccaggattataagtgttagagtaaggattatactgctgttgaggtctgaatgactggccaggttgcatggcagaaacttcagcaggctgttctgtctcttggagagtggggcatgcatctgtgggatgatcaagtgcacaacaaataccacagagccttggttgattggctgccatcacattctgttgttgcccaatagcaagctgcctcacaagggatgtcaactctgttaatttgttttccaatctctggttatcagcaaccatagagacagaagcttcatttgcaaccatcaccttggatgttgtaactctagcaccaaattgttgatagttggctgccatgttagaaatcaactgccttgcagcaagagggctcttgtccatcagagcacctccactagctgcatctatcatactcctatccatcaacatcaatccttcataaaaatactgaatcaataattgctcactgatttgatggtgaggacaggtagcacacagcttgttgaatcttgtaaggaccctcattcttggcgtcagaccccgcgcgacagcgcggggattcacattagaaaaccccgttgagggtgtggcgctgatggcgccagggttggcgctgatcgcgccacagactcagcaactccacgctggtagcgtggctatggcgccagtggcgtggactggccgaatggttggcgcgggtagcgccatggccgcgcggatcgcgtgggaagtggtctggaaaaccattttcctctggaatctcacgcggtcagcgccagaggccacgctgggggcgccagggaactggcgcggatcgcgccaatgtcacgcggttggcgccagagcaccgatattgtggcgcgggtagcgccagaggtggcgcggatcgcgccagacctcgggcaggctgagtatataagggtcaaacgcgaaaatggagggagaaagtgagtttcttcttcctccagccttcaacctccattagagctcactccaagcttcctaggaccttatatgctagcctaaacacttctctgtgacctttaaccttgattgaaccgattagaaagctataatccttcatttgattcttgaaaaatcccttgtgagtgagagtttgagttctccagtagaaacgtcagaggacttgagaataggcgagacccaaggcaaaagataggcaccagagctcgaggaagctgtcttgaggtctccttggtcgctactgaggtaagaaactcaagttctcttggtctctgtgaatttgggattttctgagttttgtgacccatgctgagatggggctagaattagcccagggtcctgttgagaaacttgtttagaacgatgaatagatgaaggaatagctttcagtttttaattctgatgattttgggttttgactctgtactgtctgtgtggcctgtgaaatggtcacttgtgtttgtctgttgatgtaccagagccttagacagaattatgttgagcctgaaagggctgatggaatgagactttgagtaggaactcagtccattctgaagattagtgagtaaagctgagagaactaggccagatggctatactctgagtctgagatgactcagatgacttgtacatgggcctgaaagaccttgtgtggtctgagagcagcctagtgtaggctgagcttgcttgaaccctaggataggggaattctgatatgttatgcactgtgaattgtatgcctaagggcttattttgatatgaggtttgcatgtgccttgattaggctttgattctgagattgttggtggcgggagccacagacctgggaaggaaccgcagactgagaccttaccaggtaagttcagtgtttcttggggatgaattcccgctttggttgcnnnnnnnnnnaattagcaattaagcccacttacttgcctaggcccaaaactgaattagaataggaaaataaactagaggtcaaataagctaagagtaatagaaaaatattcaactaaaagcactctatcaatcgccgagctcccctcctcctcctgagtgaacaccttcaccatctacgtcgaagaagactagaaaagcaacacggcttattcattggctaccaaacctgtcgagagacatgtggttcatgtggatcctgccactgggaaggctgatggttcccaccaaaagaaattgaggacatatttggggatcatcattccgaacaaggtgcatgtcatgattggtaattggaataaagttcttacagcccagaatgatttgatttgggaggacattcaggtattacaactaaatgttcaatgtcaatgttattggttgtacaatcttgaattaaaatgttttggtaattgttaatttttttttgtatcccaggctgaatttgatataccagaagcgtccgaccaaaggatgaagaagaaaatccttcaaacagtaggcgagcagttgagtttaagtcatatttcaactccaaatggactctggtacaaggcaaggaggaggaaaacgacactatctatgagaaatatggtatcagcaaagaaaatcggcaccaattttgtcagagtcatagagccgctttgtgggaggttagttgacttgcattgtttatcattttgacaattatgcagtattttaaagtgcattttgttgacaaacttttgtgtaattttgacaagatattagaaagaaggctaaggccatccaaaaacaaaacaatgtccctcacgtgttgtttcgtgggggttatgatttatcagaacaaaagataatggaggaaaaacaaaagcaatgattcgcagaagcaacccaatccgggatcatggaaacaatcgctcatcctttatctcctaaattaattatttatttcaatggtcattaattaaattcgtaaactcatgcaatgttttgttcattacaggaatcccgtggacatcaggacgtactgactggtaccattgggcgaccagagcactctagtcgtgtttgtgctgctagagtaggtgtgatcatcagacaatactttggaccgacttcctcaagtttccgaatgtctacgccattgacgtcggaagacttggatgaactgaagaataatatcaggaacgagctggagcattcgatcattgattcatcaactaatgttgttgttcaaacaaatgcgatcccagatgcaatcctagggattcatattgcctcttgaggttgaggttggtccttctgctacccnnnnnnnnnntatgtctgtacagaactttgatgatatgtatatgataacttccctaagtacatgtgtatgtttatatttgttgttactctgcctaaagatctgttatctgtcttattatgttattttgatgaactggatcagcaggggcgtggtttatgtttctgtatatgtgtgtgttaataacatttatttatgcgtttccatacataatgtatcaagaaaacgatcctatgtttccgctaaactattttattgatgttttatgtgctaacctgatattattaatgataacacgtcggaggcctacggggtgttacaaatctctcccaatactcatacaaagactctccagggaattgccttatgccacaaatttccttccggatggatgctgttctagaggcagggaagaatttctccaaaaatcttctcttcatgtcagtccaagtggtgataggatctggttgaaggtacaatcaatccttagcaacaccatccagagagaaagggaatgccttcatcttaacataatcctcatgaacatcatgtggtcgcatggtggaacacaccacatgaaactccttaaggtgtttatgaagatcttcaccagcaagtccatgaaacttagggagcaaatggatcaggccagatttcagctcataactgacctcagtctcagggtattgaatacaccaaggttggtaaacaacatctggtgtagccaactccttaagagttacgctgtttttagccatgatatcaagatgtgtagaagtagaagaagtagaagcagattcagaatcaaagttagaagatactacactactgtctaaaactacactatcaaagtcatctaagtcatctaacctaaggttctgtctgtttaatctgtgaaatgtcctatctatctcaggatcaaatgaatgcagttcacttgatgtggacctagtcatacacagttcagctcataaggaacaataaacatagacagcacagaaatatcaaacagttatgctactaggacactactaactatatatgctgaaatgaaatagaaattggaaaactgccctaaaaatttttgaaaaaatctaaaaaaaaataacagtgaatgtctaaaaatcatgattgatttttgtaatttttttggtgaattttaaaaatcatgaaattagaaaatcgcctaaaaaatggcctaaacgatggaatttggcgatttggactcctggtgaacatgttactccataacagttcgacttgatgtatgaattttctgcaccttctggtaaaatttcagccaattctgagatagtttgctgtgaaattaccagaatgcccctacggtaattttaaaaattggtccaaaactcctacttagagttcgaatttgccaatttgaacccacatccaacccttaaaggagttgcttttgtttaaaatgggggataaaccttggggaacaaatcgcaactcaaactgcacaagttgaaaaaattttgggacagcaaaatgacactacaaaaacaactacactacactactttctccctactactactctgttttttgctctgttttttcactgttttctctgttttttgacagcacacataaactacatcattcatacttcataatgcacagcagcaataatgcaaatatgtgacaaagtgcaattatgcaacagaatgttaatatgcagtgaatgtatgcaaatatttttttttatatatataactactactaagaactaattacagcaaattaaagctagcacacaatgaaccgtgtccccggtaacgacgccagttttgataaacacgttgtcgacacgcaccaaaacaattttactaagttaattctgtagcacagagctaacctaggtcgactcagagacacagtcaatatggttctagcttcaatttacgaatacagtgaggggggaattttatcaaacagtttgtgtgcgtaagtaaaacttgcaaaaatgtaaactaaaattaaagagcaacacagaaactaacataattcaaaagaagtaatctaaaacagaattaaaacatcaatccaattcacctcaccaagcaattcgaatcatcatagttctcagaaatttatcctattgtgatagttcattcaatctcattagaagcaactcaatcgaactaacccctaaattgattgaaaccacaaccctaactgaaatatcatccaattaatctgtgattaatattcaaaattaggaaatgaatccataacctaatccattttcaaccctaaacgcattcataatcatgaaaacagaatagcaattaaagaagaagatgaacattcacatagaattcgaaatactaaaccagaactcaaattctcgttgtgcttggattggatccttggattgattgaggatttagccttccatgatcatcatcagtgaaagccccatggaattattgcatgagaatggaagaacagaaaaataaaaatgaagaacaagcaagaacagtagagggaaaatgaagaacaagggtttgattctaaaaactaaaggaaagaactataaaacttgtttattgaaatgtaaagtgtggtgcccaagtttcactaaagtcactaatatatgtagtgactgagtactgaaaataaaatgggccacaaacaaacccaacaatctaattatttgctatttacaaccatgaaagtcaaattcgcagcccaaaattacaagtgcaggggcgctaacttcaaagcttaaaatgaccctctaaatgacagaattggcctcaggctatttctagtaaactcgtagatcttttctttatctttccagggactcctagaacgatccattcggagatcggtagcactctataggccctgcacaagccagatacgtcaagtgagcaaaaatccaaaaatacgcaacaattagcaattaagcccacttacttgcctaggcccaaaactgaattagaataggaaaataaactagaggtcaaataagctaagagtaatagaaaaatattcaactaaaagcactctatcaatcgccgagctcccctcctcctcctgagtgaacaccttcaccatctacgtcgaagaagactagaaaagcaacacggcttattcattggctaccaaacctgtcgagagacatgtggttcatgtggatcctgccactgggaaggctgatggttcccaccaaaagaaattgaggacatatttggggatcatcattccgaacaaggtgcatgtcatgattggtaattggaataaagttcttacagcccagaatgatttgatttgggaggacattcaggtattacaactaaatgttcaatgtcaatgttattggttgtacaatcttgaattaaaatgttttggtaattgttaatttttttttgtatcccaggctgaatttgatataccagaagcgtccgaccaaaggatgaagaagaaaatccttcaaacagtaggcgagcagttgagtttaagtcatatttcaactccaaatggactctggtacaaggcaaggaggaggaaaacgacactatctatgagaaatatggtatcagcaaagaaaatcggcaccaattttgtcagagtcatagagccgctttgtgggaggttagttgacttgcattgtttatcattttgacaattatgcagtattttaaagtgcattttgttgacaaacttttgtgtaattttgacaagatattagaaagaaggctaaggccatccaaaaacaaaacaatgtccctcacgtgttgtttcgtgggggttatgatttatcagaacaaaagataatggaggaaaaacaaaagcaatgattcgcagaagcaacccaatccgggatcatggaaacaatcgctcatcctttatctcctaaattaattatttatttcaatggtcattaattaaattcgtaaactcatgcaatgttttgttcattacaggaatcccgtggacatcaggacgtactgactggtaccattgggcgaccagagcactctagtcgtgtttgtgctgctagagtaggtgtgatcatcagacaatactttggaccgacttcctcaagtttccgaatgtctacgccattgacgtcggaagacttggatgaactgaagaataatatcaggaacgagctggagcattcgatcattgattcatcaactaatgttgttgttcaaacaaatgcgatcccagatgcaatcctagggattcatattgcctcttgaggttgaggttggtccttctgctacccgtgtcagcacaaaagaagttgatcccttggagcaggacccagacacaagtacataagacaattgtggattgaatgataaagacaatcctccccgtctggttgccctgggaatagtttatgaggggtcaacaaccatccacaacgtctctttggccaatgatcaagtgaggtgggtgctgaggaagtttgagatgttaatgctcgcatttttagctatgaggaagctgaagattatggaatcaagaagaagtgaagattacatattttgatgtttcacatgccccctcaattgatgacatttgtaatttcttgtttaagcttggttcagttgataaagccttataatcctcagtagttttgattaatttatgcattcatacatacatttaaatagatttaatcatatggtaattagaaagttaaaagaaattcataaaggcaactaagaagtttaaaaaaacaatttcttactgttttaatcgattatattgatttaatcgattacaacaagtatgggttttctagaaattgccttatgaacattttaatcgattaccattgattcgtaatcgattaaattggcctaacacgtttttaggactttctgtgataattgattatctcactgaataatcgattacattaacttcaacataatttttcaaagcatttttatctggtttaatcgattaccagatgttcgtaattgattaaatatgaattgatgtgtttttaacatgttctgtgttaatcgattaaaagggaactcaatcgattacacaagtgttttagaaaactgagttcatatgaaataatcgattacaagatgacttaatcgattattttgttcgtgacatttttccagattcctgatgaacactttaatcgattatctgattaaattaatcgattacattagttaaaataatcgattacattgacgaaataatcaattacagttagttaagtctatttttttataaatagaacagcttggtttatgattttaactaagagaaattttgatagactcatgcaagccttgagaaaaacactttctacagatctcaaaaacaccaaagctgaatttagaaagaaaatcaaagatgctaagtgtcatggagagttacatgatttgttagtaatcatgttcattgtttgaagagttgttcaagctttttggttaaagaaatcattaagatttgatgattataaactgagcaaaggaaaagaaaacatgagtttgcaaactgaaaattgctatttggttgatttgctaagaaagtattacaaaggcaaatgtaacttagatgaaatgctaagtgttcaaaagtatgttggtgatacttatggattgggatacaaacatggtgctagaactcaaaataagcttgtgtctgtacctccaaaacataagaatcaaaggcagcttaatcaaccaaacatctatcaaatatttactcatgctaaatcatcaaaatttcttacatgcaattattgtatgcataaaggtcatacttcttacaagtgctttgctagaagattttatgttcctaatggtgaatgcatatgggttgagaaaagaaagaaagcaactaacccctttggacccaactcaaattggggaccctatttctctctttaaatttgatttatgcagatgtgtcttagagcaaagtcatcaatatggtacttagatagtggatgctctagacacatgaccggagacatatccatgctcacagatgttatacttgaagaaagaggatatgttacatatggggacaataacaaaggcagaataattgggcaaggcaacattggagacagcttatccactaaaatcaaggttgttctttatgttgaaggggtaaatcacaatttactaagcattagtcaattgtgtgacaaaggtttcaaagtcaccttcaacaatgagacttgcttgatccatgaaagcaagaatggcaaagttgcacacattggtaaaaggaagggtaatatctatgttctatccattgaccatgcattcatacataaaactgattgcttgatgagtaaagtgaatgaaacatggctttggcatagaagaacatctcatataaacatgcatcatctcaacaagctagttaggaaagacttagtaattggtctacctaagcttaagtttgagaaggacaagatttgtgaagcatgtcaaagagggaagcaaactaaaaacttttttcaaagtaagaatatgatttctacttctagacctcttgaattgcttcacatggacttatttggtccttcaagaaccatgagcttaggaggaaatcattgtgcacttgttatagtagatgattactctagatacacttggacattgttcttaagatccaaaagccaagtattctcagcttttaagaaactagccaagttaattcaaaatgaaaaggggtgtaatattgtttcaattaggagagaccatggtggtgaattccaaaatgatctctttgaaaagttttgtgaagattttggaactaatcacaatttttcagctccaagaacaccacaacaaaatggtgttgtggagaggaaaaatagatcacttgaagaaggagcaaagactctcttaaatgaaacaaaattacctaagcatttttgggcaaatgcagtgagcacaatttgttatacccttaatagcatttttggacctgacataatgttaagtgtttgcttatgtactaggtatcaaaagagtctcatcaaacagctctgaaaaggatcttcaagtacctaaagtctacaccaaaagtgggactttggtatccaaaaggtacaacaattaatttaattggttactctgactctgattttgcagtatgcaaattggatagaaagagcacaagtggcacttgtcatttgttggaaagctctttaatttcttgacattgcaaaaagcaatcttgtgtagccttatcaacagctgaagctgaatacatatcagctggaagttacaatgctcaaagtttatggttgaagcaacaattctaagattttggtgtagaacttcaaaacattccactcctatgtgacaatacaagtgctatcaatatttccaagaatccaatcatgcattcaagaacaaagcatatagagataagacatcacttcattagacatcatgtgcaaaaaggtaacattaagattgagtttgttgatagtaaaaaccaattggctgatatttttactaaacctttggatagggatagattctttacattgagaaatatgcttggaatattggatgaatctagtacatgttgagtaacttttctatgcttatttaccatgtaaatgaatggcttagacaatgcatgatagaaagtaactcaaattggaataaaaatacatgttggttgctgcataaagtctgaattttagaattatagctgatataatcgattaccgttagaccataatcgattattggcttatctgatgcttctaaaataaaagtcaaagttgttgtaatcgattaaatcatcgaaataatcgattatccacatctcgagtttctgaaaaattctaaactcttctagaataatagattaaatcgattacatgaagtatctggtgttttccaaaatctaaacacttctagaataattgattacatcatcaaaataatcgattatttaggtcctgattgtttgaaaaatctgtctcactttgctttaatcgattaaatcatttcgtaatcgattacacttcgtcttctacaagccatctgttatgaattaatcgattattctgtattttaatcgattactccatttatcagaaggggaattctgaataaaataatcgattacaacaaggaaataatcgattatttaagttgttactgcaaaaaaaatctgacagttttgaaactgcccaactgcatttaagcacgacttaaaagaatcttagccttaatgatcatgattaaggtcacaacagccatatttttgaattctcaacttcccattaacaccaaatttgtctataaatagagactttgcagtcttggcaacctcacactacaaactctgctattatttctaaactctgtttctcattctcagaatccttcttatcttaagaagctctttctcttcttattcctgaccttttgtcacaaagatgtcttcttcaaaaggagtcaaaacctcaaaaaggaaggcacaggcccaatcttctaatcaagttgtgagtaggcttgatcattggttcaccaatgaagctgataaaatgaactacctacagttcaatgctactaagcttgtctgttctcaaaaattcctaagcctagcatggtttactttccacatatgttagagcaacaaggcctaacaaagtttgttgaaatgcaaggcgtgcaccttttaccctgagttggtaaaggttttctacacctgtttcaaaatttccatgcactgaacaattcttactcaagtcaatggagtagctatggagatcacacctgaaatttggaatgaggtagctggaatctcctttgatggtgaaaggagatttgaagaagaagctgaaggttagaacaagatggagacttacagaggcatgcttattgatcctcacatgaacttgaggatgagattaaatactggacctatgactcatgagaataggctcccaaaacacccttttagccccttttagatttgagtgggtatttgaccacaaatgttaatattgatcttaccttggaaatctatattaaattgtcttccatttggtatatagagctctgtgtttggtatattgactcccacaacacaaacgaatacttctgtccttcttcttcacaaaaagaaccggtgctccccacggcaacacactcggtctaataaactctttggacaacaaatcctcaatctacaccttgagctcctttaactctaaaggagacatacgataacctggaatcaagtcaatggagattcaattcccctatctagtggaagctgggtaatctcttccggaaatacatcaacaaactcattcaccaccggaatctctgacagatctaccccctgcttctcatttgctgcactcagcaatagatagccctgagctccttccttcatttccttgcgaatttgcaagaccgagagaaatgaagtggaactcgagctgactccatctgaaggcaccatgaccttcttatagcaacaatccagcaaaataccatacttggccaaccaatccatacccaaaataatctcaagggtaagcatcccaaggaaatacagattaacactgtaatctctgccttcaaactgaaaatgcacatctctgcagcacatatccactctacactgctccttagaggcggtggtaacctccataggagaagaaagtatgaacatcggcaagttcagccctaaagcagtgcgatcactgataaaagagtgagtagctccagagtcgaacaagactctcacatcataaacatctatcagaatagtacctctgatcaaatcaggagctctggttgcctctctagcatccattgtgtagatccggcctgcagtgggtgccactgaaatcacaggagtagctaaagctcggtcgcctgcctgaggacactctctagcatagtggccatgcttgccacatctataacataccagctaccaagtagggcacactcttcagtgattcctcccacaagtagcacacttgggaagtggaaccgctctctgtggtgctcctttctgactagggcccttcttgaatctgtcggctaaagaagaaaccctcaaatctctgcgcttgcccttcatggatgggcctggaccactgggtctcctcacctcctgtctcacggaggaaataggatggctgccactgcacctcttgatcatatcctccacctgccgacactgtctcaccagactgccaaaatcttgggacccactaccagctatcttctcctcaatgctctctctaagtcctctctggaacttagcatcaagaagctctgcatcaggtagagccctccagaaatgtgcatacctaaccaattcattgaacttggccaagtactcatccactgacatctgcccttggacaaggccctcaaactcggcctgctgctgctctctggcatctctgggaaaatgtatgtctagaaattgggcctcaaaagtctgtcaggtgatagccttaccctaggctctcaacaactgagatgtggtgacccaccactcatgtgcatttccctaaagcatatatttggcatagagaagtctctgatggtcttaacactccatcactatgaatatcttctctaaggcttgcagctatctggtggtagcaatgggatcatatcccccatgaaaagctggaggatcatgcttacggaaagcaatgagaatcttccctctagcagttgtatcctccttgacatcagcttgggacaaccggtcccctctatggtggctaggtccatcagaatgatggctacctccaccctggtggcaactaccctcgccctcattggtatgatgtggagaagatactttatcctctctatgcagatatctcaactctgctattaactcctcgttgaccttcaacaaggcctcattcgcctgcctgtttgcagccatctcatgctgcatagctgccaaggcggttgtcactgggtcaggttgtccatctgcacttgccgtctcactattgttccatgtcctcctatggcactgcacatgtcatgtaacagggtgagttgatcaggctcacactcaatgaccacacatgcaatagtcatcatgaacacctaggccattagtgaacaacatacaattcaccatacataatgcttccctatgaaactgctctgataccataaaatgtaatgccctgtatgcatccggtttgttaacattcatatatggccattaacacatcaattaaccaagataattatttcggaagcgataaacaaagaaatgacatcatcacacgtcaatatcaacacccactgaacattatatatggtgaattctcaatatgcacaatgtttatacaaaactgtacataatcccctcaaggtacaaaacatcaggcataatcaaaatattgagctaacaagctctcaaacctatgcctaaggttcccatagaacctatccctacacgggcctcttgccctgggatccaccatccactccctgagcatcacctgcaaaatataatccccaacaaaggtgagataacaatctcagtaaactcaaggtccttggaggtctttcctccccctggttcacttccattgcatataatattaaaatttgcatcacacacaatccagccatcacgactctcaaacatatcacatgtatattataacacagatacacatatacatatagatatatcgtactgcctgtgaaagatcatccgcgacgggtacattctcacaggacttactcagatatatcgtattgcctgagaaagatcatccgcaacgggcacattctcccaggacttactcggacatatatggcactttcgagagaagatcatctgcgacaggtacattcctctcaggttttatcacacacacacacacacacacacacacacacacatatatatatatatattgaccacttagatttgttccacataactctggctctaagggaagtccatatttagtccattctactagccaaagaatctcatcaatcacacaacactatcacagtgtatctcatcgtatacatgatttcaataaaaagcagttacacacaatttcaatatacatgcatcatgtcatacaataaccatcactccctcggagtatggtggaacgcagacaatgggaaacactcccaaagagcttacctgctctgagtgctacactggctctcccagcctcgtggtcacattcaacagtaacctctgtatcacaccctacataaaggcataccagaatcaatcaataatggttatcaacagttaaaagaacagaaacatcattcttttacatataacccttttattactctatctcaagctttctaaggctagtcacttaactggtgactgacagatcctcactaggatctatctcggcctaacaaggtactagagtcgctctaagaccctgcataagtcaattcaatgctattaccagaccatatttcaatgattatccaacttaactaaaacagttattccaacacatttttaccgtttatttagcctcctgaataacttttgtaaaagcacctaggctcatatctatcataataccttccatttcatcaacattcttcctactcatagatatcttagagtcaaaaccaaacttcatcaaaagtcatgattcaaagttcaatatccattagaacaatctcctgagcatacttttctaaagaatccaagcctaattctagccctaagacaattgggtcactattcatcccaagaaaaatttcacaatcaatcggtaaaacttaggtttcttacctctaaactgtcgaggaaggctagagaatcacttctcccagctttagcgtccttgaatagccttctttcccttccaaacctcagttttgagaactggatttctccgattgatggttttctctaaggattgaagcttgaatctagctcatacaggagttctaatcaactttctagttgggtggaaagtgttttgatgaagaatggagaagatatgaagcttctctggtcgttaatggcagaaagcacggggaggaagaagaaaatgaaacttttggccaaatttcatgaaaatggccttttataggcccccagctcgcgtcctggcgctaacggtgccattctggcgctatcggcgccatattacagagaaaattggcctctatcgtgcctcccgcactaccagcgcagctaatggcgctactggcgccactctggcgctaccaatgccagattccagtgaaaaatggccttctggtacattttcacgctaccagcgccaatctcacgctaacgacgacagttttttttttttttttttacaaaatcatggttattatatggtgccactatccgttctcctccaaaatcgccagactttctttggaggaagaacatggaaaagtcggttgcattttgaattgcaactgatcagatcaaattcttctcaaaggaagatacaaagctagtcggagttttttgctctggcccatacttcatgctccacaatgagtcagtatcatgtgatatagacatgattaagggagacgttgaagaagacaacaccaacgccagtacaatagagggaggaatcgggggagttgaagaggaagaggcggtatgtcaagagcactagtgatcaccacatcaatgctcgagaagaggatagttgtggtggatggaggagccactacaaggctagccgacgagatcaataccgtggtcacggcagcaagggaaacagaaaccctatgggcaggtgaggaagaaggagttggaggagtaggagcagaaactgttgattcaagaggagctaatgcataaatggacaaggttcaagcttggtggttttgtgctttcaacatgcctcattgcaagtgtgtcaaagaagctttggatgatcaatttgattcatgtaaaagggaagttgagtaatctgataatccaataagcattacatgcataatcattcatctaggattgttagattgatggtctaagtaaaagcaattaattagtaaggcatttaaaaagctaagtttttgggaaaatgaagttttgttgaattaatcgattactatattgttgacatcgattattttgttcttcgtgccttctgaaaaacaaagcaagaacattgtaatcgattacatatcgaattaatcgattacacaggctaaaatagaaaaatcaagctgactgtcttaatcgattacaacatttcgtaatcgattacatctatttctatggattacatgatcagctggtttaatcgattacatgtcgttttaatcgattacatagtacatttgagaatacatgcctgactgtcttaatcgattaccatattctgtaatcgattactcaatgcatttagaaaaacatgtctgtctggtttaatcgattacttcacggaataatcgattacattgttcatagctcaagcccagaacatatcaggagcattttaatcgattacattcttggattaatcgattacatatatgcgaaataatcgattataggagcgtgtttaatcgattattgtctgttagaaagctgttataaaaggaaacctcttgctctatttttgtgacttttgagaaattcgaatactgagcattcacaaacgttcataagctttctttagtgagttttctgagtttctaacatcacataggcttcacaaattcgtatgggtttctgaattaatgaagtgaagcatcatcattgtcaaagcataaggaaggaatgtattgagtttgtaatctatgtttcaacctgattgaatcattcacatgcatgtgttcattggattatcaggtgaaatctttccttaatctttgaaggtgtaattctctgaattgtattttttgtaaagattggtctattgtaaaatgggtttcttacatgattagagatagtgtttctctaagggaagctgagtagtgttctcagtttgggtttggtctctaagggtctaatagtgttttagacttctgaactttatctagggttgataaagagaggcttgtaatttcttgtaagaatattttttgcaatagtggaactctactctagtgtcgagtagaagaactggatgtagcttcatagtgtttgaagtgaaccagtataaaaatctttggctaatctttcttcttatctcatcatctctaaattgtcttgattgtgattcaaatcatttgcacacaaagttttaaatttcttattgatttcttgatagaggaatttgattgaataaatgattcttggtttcaatacatttttaaagtgataaagatcctgtgggaaaactttgatttgaaaatttttaaatttaccaaggttcaaccaattcacccccctcttggttgtttagaagtgttccttttattttcagaaacaatagcctggacagccgatgataccacaaccagaccctgcaaaacaatagtaaaagggccactcgaatcgggaagtagcctgatagcctaatcgcactaaggctgagaagagccctcaacttcttatggcttaacgtcttagcaccatcatctttcttcttcttagcaaaaaataaggaagggatgctggtggaaacctcaacaatctcagcacaaatagggtcaaccctaacagtaggttgacccacacctccagtaggagggttggtagacgaaggttgcacaaccccaccaacaggtctgacttgcttcactaagggcctccgagggatgttgcccattatatctgcaaaatgagcaaaacacgacaagtgttaattcaggataaatacctcagacacaaaggaagataaagaaaaatattttactttctaggaagggaagggataactcgtcgagggtagggacaggtaggctcaaacatcgagcaaaactagtagttgttccaaaatagtcttttccaacctttccataaggatcaacagatccttgttgaaagacttgaatcaaataggatcagaatgccagtagaacgggaagtgaggctcctcgtttcgattgaacatcaatgcagcccatcagtcacgacatcagtagcctagaccttgaagaaattgtccttaaaatagcaaaacacgttcgagtcaaactccaacagcttcttggacatgttgtttaaggagacccaacctatcttgccaggaaacttcatttggaagaagtacaaaaacacttatatactaggtcggatgttaaagaaaaggcacaaaatctcaaaagtcctcacattgctcaacttttgggatgaagttgggaaagggcaacgttcaagtgatcaagtaaagaacatttaaaggaatttagataaagaatcaaacctaacacctcaaagagacactatacataaaaaaggcggacaacttggcgtcgccctttagaaaagggaaatcatcactcctacaggcctcgacaaccaccttgaaggagtcctcaaagttagccgacttgagttgacaataaagagcaacgatactcaccgcaaagagatagaggaacaataattcaagtcatcgcacctcacccactcgtagccaatgacagtaggagtatgacaatgacccaacactatggctatatcacacacggggagaagccctgacatcccctccaccactctttctcacacccaccaaagtagaagagggaaggatcatggtaagtggaacgggttccctgtctagaaagccagcagaaggttgcttcctcttgtaaagacgagaagtaccttcaccaatattgcgcgagaccaccctcctctctgaagaagactcgttgtaagaggttccatggcaagtcgtagatggaaataagctctcgatcaatcaggggttgttgtatcaaacccccaaactcactacctctcgtacccatggcgtaataaaaaattaaagtcagagacatgatcaaaaagggggattcctttaatgaaggaagaagggaaaatcgtgaagcaagaaaggttctagaagggaaaaagttagaaatgcaaaggtggtggtgatcaaaaacaccaaacgtccattacatttaagtggaggtgtgacccttcgaaaattggtgggagttgaaatgatgccctagaaatctaggccatgatgtagccccactcacctacaaactgcatgtccagtacgtgtccactccacgagtaacacgtatgcaagaatattgtgcgtgcgtcgcactcgcctgtggcaaaggacaagcaaaacgcttacctttagtacattcttcaactgtcaaataaggaaaaagttgtctaatacgaatatctacctgcttgacatgtctgacctcgtagcatagtaaatagtatgtcttccatggacccttgacaaacatgcaactctcgcacctgtcgaggttaccacaatcaacattgaacaacatttgtccatgctcgggggctcgataaactcgtgacccttctacttgtcaaggctactgtccacgacaccggacaatctccatcaacaccaggcaatctcattcacctgcaagctggctcagagcttgaggggtttatgtactgtccagggtccacaaaatacatgtggcaagtgacgtggagtcacttgcacgcacatcaaccctctgtgtcagccctagcataggaggtcaggagcacaagcatctggcctttagcaactaggctactggacccacaagttatgtctaacaccttattattcaaatattaacaataatgttgtaacctccctatcaattggtaggtactcaattatctgtaaggaacaaattatttataaggtacacattatctatacgacataattagttttaacttacaattatctactagtcattatctacaaatcaataatcatctacaagggttgttactgtaacaaccatgacacacaaggacgtgaggctactccttcactctataagtattaggtttcatctcaccctttggatatttcatccttacctaacttacgtatttacttgagcatcggaatcctttgctttgtagatctcccctcttgccctcttaacaaagcaaactcactagaacagggttatacacattatatacttgttgaacactctctagaacaatgcaatgagaaaagacaaaggatgaaagacgaactaactatatatgtggtccaaattgttaaaatgtatattcttttaaaatgagaacccttttaaaattatttattatactttatctcacggcattgtcttctatatgcataaaaccaaattacactcacatccagcaaccccctttctattttagcacgtccaaattagtttttctctcacttatttgaactataatacacgtacgagttactgctatagaaacctaaataatgtcagcacattccattgtcagcatatataaacccacttatagacaagaaataaattacactctcaccacttaaaagaaaaagaaaacaaagtgaacgcccttcttaattatctgcaactcatctctcttgctagagttattcacatttcacactccatcctccaaatttatatttttctattcatattaaaaatccaactctaagttgagaaaaagataaaagtaagtccgtaatttctcaagttacattttacgtactgtaccccaatttctgattgaaattttgaagagttaaatttcaactgtgaaactgtgctttaattaattaagtgcttcaaaatcttttccttatttgatacacatattttctgccttacatttaattttccaacattgataggtgtagcactgatgaccatttttttattcataggaattgaatatgatatcagaaaatttgcaacactcaattgatgaccattgttgacacaagacagaagagaataagaattcgatttaattatgtatttaatgtatttaaatattagcctgctagctcctgaactgatagaaatttagaaacctacctattacgtaataacaaagcacagaatttgtcatttttgtatagatatgattgcaaagaaagatataggcacatcaactctcataatatcataaagtagacatgattattttttgacagaataatgtagacataattaagaagttgagtacagtaaaattttacaactaatttgtatggtatgtcaaaaattaaattgaagtcatttataaagcatgttgagtataagcataaggcttttattttagaaatatgatacagaaaaaaaatcatacactaattttacaatatcaatttgggataatctctccctatcacttaatttattacatttaaaacttctctttctctccattgtacaagtaacatttctctttattttatatctcaaacaaatgttagttttgctggtctattaggtctaactaattgaaggtggactttagttttactttaaggattaaccttccttttaacaaattaattgtatacaaaaataggtataaaaaaatgagcaagtaatataatgtcttttagcttaacaaaatgaatgcaatcaaatgaaccctacacatctcatgagaaagataagtagatgaataaattaaaacaagtgaactattttctcaaaaattagcttttcttaatcaaagaaaactctcatgtgagtctcatattaattaggtagttttcctttctcctattttgtgtctgcaaccaaatgagctaaaaaaataggatgttttccttattttcctcaatctaattttgtcagctcttgttttctcttggaacatgttattatatataacaataataaaagacttgatccctcatatctaaatgcctttcaatccattaatttatagcaataatgctaagaaagaatatgatattaggactcagtttgcacaattttttcagtaaatattttgaagaaaataataaagaaataatatccataaaaatatataattatctatctcacttttacaaaaaaaaaaatatttattgttttttttttaaaaaaaaatacttaaaaacttttataacaaaatttagaaactcttatcttaaaagttttaatcaatttttatagttattcatacaaagtaggcgtcaaacgtcgggaacaatcttgtgatctcaagaggaattaatattactgttaccatattctcaaaaatcttctcttatttgtcttgctcgaaacacagcagagaatggttaattggagtggggaccaaaatattcttgtgatctcaattggtccaactgaagttaatatagaggaaatattgctctcatattattattattatttattatatgcatgcaattaagtaaaggactaagcttatgctagtattggcaaatgcatttatttgtgtgtgtatccatctcatagcagtcacctattttattataatccatgtctgcaaccctttctgccctgggatatatttagagtaattttagtagtacgtaccatgggcgtgaaaatgactttcacagcaggcatataggtactaggtagtgtaagaattactcacagaacatagcaaagcatttaattaattcaagtttccatatgggaaactacgtatggaatcaccgattccatttttaccttttcaagatgttcaactataataatactcaatgcaataaaataaatgaaacttaattgaaaaacaaatgataccatgacagcatcccctatatctcataatatgtatccaatagcagcactaagtgacttaatgaacctgtgaacaagcaccacttattgaactgcaacaccaaatcagaatcgaaaggtagtggactcaatagtgtttagataaaagcctcggtcaacttctccttctacgattgctcagtttttcctctgatgagttgctgttgttttgactgattttccttattttgtgttctaggacctttttcgtctttgtattttggaactagtcccctattaatattatatactcttatttgctgacggaaaattaatgcatttgttcctatatatgctgccaaatgtaccagcaaagcttccatttcctgttgtgacttgtgagttatcttggtaaattaactttggagctgtgatgtactgatttgggaatccattttttagattgctctcgcaaacaccaagatgtctgtggtgttttgctccatagtgttgctgatcatcaacaattgcattgaagtggtttcggtgagaggagattatcacaaaactggattccatttcccgccccttaaaactggatgaacggttagtatgaagactttatttctgtcctgtattttcgtttttgcatatctgccatattctctagtcagttttaatcattgactgtaaagtaagtctgcattataaaacactagaaaacaactgggtctctttgaaaaggggatgaattaatgaatagattgtaatcttgtttcaattattttgtgtacatattgcagtagagatcttcaatatgctactaatatttcacaaagtggtttaagtcagcattttgacgacagcttctcccctactaatttattctaatttattctctaacccatggttgttgtcactcgaagcaatttttgacgacagcattttcaggttttttattctatggcactccataacttttaaggaaattgtatatttgttattgttattttgtgcacccctaattttataattttaaccccctgctcttaggttttcaatcgttgccaaattttatcttgggttaattaagtttttaatccttaaactttttgaaattcagtttttagtccataaacaaaatttgtcaggttaaggtccttaaactttttaaagtttgattttttagtccctaaacaaaagtttaactaatggaattgttgttcattcgaaggttttggttacttcatctgaaaaccagaacaattattcctttgaaaaccaaaattacctttggaaatggaagaggaagatgtcggttcactcaaggaagaggaagttgcacattgaaacaatgtaccttttgtgatagaatgggaaacaatgttagctaggaaatctcgcctgcctcaattctccatgtgcaacttatatatttgttggataacttcacttggtgtcaattaattttaagctgaaatctaacaactcatgttactacaaacatggttccctactaagaagacttttgtttcctcaattcactggtgagcaaattcaagagcagctaaatatgctgcagcacaacaaaattcagcctcacactgttaatcaagtcagttcattttttggtgagtcatccactcatcacaacttctcgaatgaccaaacacgtaaacattcctcacaacaattgaaagcatttggtgattctgattgggccacctgccctactactcgtctctccgttacaggatattatgttttttacaaagcgcctggatccctccccatatctgaatgggctgtcatatatattaactgtatctagacaaatgagcatagaacctaaataaaactacttgtaacacacaaatatcataggtcaaccaaagacaatgcaagaaacagataaatcattttatgtcaaattttaagtatttcaaactgagagatatgaacagaggagaagattgaacacagaatatgattctcattgcataaaggtatttatactgaaaagtatctcacttttacatgggtaactaaacaacaggaattaaaaactaactaatcatatgtctgagttccacccaccctgagtaaccacctcactaacttggactgcaattggttctggctgatcattttatatcagcagatatcatgctccaagctttgaggttttccactatgattggttcagtaccattgttgaacacaaacaagtgtgcttggttcatcactgctagctcaggatagacctgtgacaaaatgtttgtcttccctcctgctccaaaactctccactatcgagtgatcaatctgccattcatttgaaaattcaaagatgttatgaaacttaaattagcagtttttatttttagaataaatggcaattagaaatgaatggcataacggaagaatagcgtaacggtagacaagccattcaatggttattaagttttaagttatggagaggcaatcttgtgcctataaattgctgtaatctttcatttgaaaaacacaacataaaacaacaacagagaagtattttcacattcgtattttgttgtcaatttggcatcagagctatcaagagaaggctgcggtgtgcgctagccaagagagagagagagaggagcgtattagagctctgtgaggtgtgtgagttgagtgtaaacacttgaagaaaaatggcaagtctaaccggtggcatcccactacccaagttgacgaaaggcaccaactatgataactggaaggtgcagatgaaggcccttctcggctcccaagataactgggatgtggtcgagaatggatatgaggaaccggcgagcacagatggatattcaaatgcccaaatgaatgcgttgaaggccatccgagctaaggacaaggcggctctgtatctgctataccgagctgttgatgagtccggctttgagaagatagcaaatgcaaaatcttccaaagttgcatgggatatactcgaaaaaacaaacaaaggagacgaacgtgtgaagcaagtccgacttcaaacccttagaggcgagttggaaaacatgagaatgaaggagtctgaaagcnnnnnnnnnnnnnnnnnnnnnnnnnnnnnnnnnnnnnnnnnnnnnnnnnnnnnnnnnnnnnnnnnnnnnnnnnnnnnnnnnnnnnnnnnnnnnnnnnnnnnnnnnnnnnnnnnnnnnnnnnnnnnnnnnnnnnnnnnnnnnnnnnnnnnnnnnnnnnnnnnnnnnnnnnnnnnnnnnnnnnnnnnnnnnnnnnnnnnnnnnnnnnnnnnnnnnnnnnnnnnnnnnnnnnnnnnnnnnnnnnnnnnnnnnnnnnnnnnnnnnnnnnnnnnnnnnnnnnnnnnnnnnnnnnnnnnnnnnnnnnnnnnnnnnnnnnnnnnnnnnnnnnnnnnnnnnnnnnnnnnnnnnnnnnnnnnnnnnnnnnnnnnnnnnnnnnnnnnnnnnnnnnnnnnnnnnnnnnnnnnnnnnnnnnnnnnnnnnnnnnnnnnnnnnnnnnnnnnnnnnnnnnnnnnnnnnnnnnnnnnnnnnnnnnnnnnnnnnnnnnnnnnnnnnnnnnnnnnnnnnnnnnnnnnnnnnnnnnnnnnnnnnnnnnnnnnnnnnnnnnnnnnnnnnnnnnnnnnnnnnnnnnnnnnnnnnnnnnnnnnnnnnnnnnnnnnnnnnnnnnnnnnnnnnnnnnnnnnnnnnnnnnnnnnnnnnnnnnnnnnnnnnnnnnnnnnnnnnnnnnnnnnnnnnnnnnnnnnnnnnnnnnnnnnnnnnnnnnnnnnnnnnnnnnnnnnnnnnnnnnnnnnnnnnnnnnnnnnnnnnnnnnnnnnnnnnnnnnnnnnnnnnnnnnnnnnnnnnnnnnnnnnnnnnnnnnnnnnnnnnnnnncgaataggagagatcaaagatgtatactacgtacctgatctcaaaagcaatatactgagcatgggacagataatggagaaggggtattcggttctgatgaaggaccgagaattacaactgaaggataaatccgggaggctcgttgcccgggtagaaatgaagaaaaatcgcatgtacaaacttgagctgaaaatagttcaagatcaatgcatgaacctggatatggaagatgaggccatgaagtggcattttcggtttggtcatcttcattttggtgggttgaccgagctggtgaaaaaggagatggtgctcggactacctaaaatggagatcggcaagaggttctgtgaagagtgtgtgatcgggaagcaagcgaggacttctttcccgaggagttcggattaccgagcaaaggagcaactcggcctaatccatatcgacgtgtgtggaccaataactccggaatcattcagtggtaagagatacttcgtctctttcattgatgatttctcgagaaagacgtgggtttactttctgaaggagaagtcaaatgtgtttgaaaccttcaagaaattcaaagtgatggtggagaaagagacaaacaaagacatcaaagcagtccgatctgatagaggaggcaagttcacttctgccgagttcaacaaatactgcgaagaacatgggatcaagcatttcttgactgctccttatactcctcagcaaaacggagtagcagaacgaaagaatcgaactattctcgatatggttcgatctatgttgaaaggaaagaacatgccgaagaagttttgggcagaggccgtgcagtgtgcagtctatgtgcaaaacagatgtccacatgtaaagctaggcgagaagacgcctcaagagatgtggagtggtatgaagccgactgtctctcatttgaaggtgttcggtagcgtggcctatgggctagtaccgagtcagctcagaacaaaattagaagatcggagcaagaagtacatatttattgggtatgatgaaaaatctaaggcatataaattatttgatcctattaacaaaaaagtggtggtaagccgagatgttcatgtggaggaaacaaagcaatggtgctggagtaacccggtcgaagcagaaacgagctcggaaatagttgtgcctgcaacagaaacaactaccgagttctcagatgaagaaaacgaaccactacagcccaggacgagaagcctgcagnnnnnnnnnnnnnnnnnnnnnnnnnnnnnnnnnnnnnnnnnnnnnnnnnnnnnnnnnnnnnnnnnnnnnnnnnnnnnnnnnnnnnnnnnnnnnnnnnnnnnnnnnnnnnnnnnnnnnnnnnnnnnnnnnnnnnnnnnnnnnnnnnnnnnnnnnnnnnnnnnnnnnnnnnnnnnnnnnnnnnnnnnnnnnnnnnnnnnnnnnnnnnnnnnnnnnnnnnnnnnnnnnnnnnnnnnnnnnnnnnnnnnnnnnnnnnnnnnnnnnnnnnnnnnnnnnnnnnnnnnnnnnnnnnnnnnnnnnnnnnnnnnnnnaagaaagagttcgagatgacagatctaggcttgatgaaatattttcttggcctagaagtgaagcagtcggaggaagggatttttatatcccaagagaggtacgctcttgaaattttaaagaagtttaaaatggaggactgcaacccggtttctactccaatggaaccgggcactaaactctcaaagtttgatggaggagaacgagctgattctggaagatatcgaagcttaatcggaagtctgaggtaccttacaagcacgagacccgacctaatgctaagtgttgggataacgagcagattcatggaggatccgagctacatacattggaaggccttgaagagaattctaagatatgtccgaggaaccgtatcacttggtcttttctattcaaaatcggacgactaccggctagtgggttactcggatagcgattggtgtggtgatgttgatgatcggaaaagtacctcgggttatgtattctaacttgggaatacggcttttacttggctgtcaaagaagcaacccattgtaactttatcaacctgcgaggccgagtacgtagcagtctcttggagtgtatgtcatgcggtttggatttcaaatcttctaagacatctgggagtgatccgggatgaagggaccgtgatccgagttgataacaagtcggcgatcgagctagcaaagaacccggttaatcacggaagaagtaagcacatcgatgtccgatttcattttatccgagaacaagtcaaagaaagaaaaatcgagttggagcatgttgaaagccgagctcaagccgcggacatattcaccaaaccgttgccggctacattgctggaaaactgtaaacggctgattggaatgagagatgggaagagtatttaagtttcagggggagatttgttatgaaacttaaattagcagtttttatttttagaataaatggcaattagaaatgaatggcataacggaagaatagcgtaacggtagacaagccattcaatggttattaagttttaagttatggagaggcaatcttgtgcctataaattgctgtaatctttcatttgaaaaacacaacataaaacaacaacagagaagtattttcacattcgtattttgttgtcaaaagaatattaaacaattacacattagtattttggagctcataatgctatatataacacgtaccatactccttagaaagatcttcttatccacatctacaaaccccgcaaattgtggtttgtacggatttttcttcaaagatgaactatttaaaaataccaaaaacaaaaacaaccaattagaaggaaatagaaaataacaagatatcatataattaaaataacctaaccccatccaatgaaattctccaaccacttaattttatctcttttcgtcctagaacctatcatgaagatatagaaagaaaaccagaagttctcatcccaaattggaatagactaaccttctggcatcagagcataagagaaccatatgtttatttggacttttgtaaactctgaaaaacacaggagtgaactcttccagattttgagaagccaaagtcagaagtccaaatggtccaacaccaccctatagttttgaacccttttgggcacatggatcctctgccattacccacttaggctttgtttgagagagggattttagaggggaaggaagggaagggaaaggtttgggtagtaacatttccttgtttgggagttttaatttttgaagaaaagaatttgaagatttttaaaactcctctaaattcctccaaagcctaaaaattgttgttccccttatttgggagtttttagaaggaaaagtaataaaattattatcctaccccagccagtgttaataaaacaccaaaatacaaagcactgaatcataatttaaagacaaaattgtaaaagtattttattaactatcaatttttctctcttaatatatttttaactctcaaacaaggaggaagaaacttccctcattttcctccctttccttcccctcactttcccttgaatctctttccttcccttcccctcctaactcccaaacaaagtcttaggatcatatgcctcagccttgtccaggcttgaaaaggagaaagtaacttcaacatctgcctgcagttatataataacattagttttatatcattatatgaatttatttgtatgagcatacactcattaatgcataattaagaatcggacctgggcagcagtgattccttttacttcactataatctcccttctcaagcttttgattgtctatgttaacttctttgcctctgagactgtttaactcttcaacaggcgattgcatcaattgtttcccagtaaaatcgagccacacagttcgaggaatagcctaattatttcaccagacagatacatgcatgttacaattcttttaatttgtataaggatacaaaaatcaaacacttatagttgaataccaaagaaaaaaattgaaatggaattaaagactcaaaatcgtgcaaagatttaataaatcttgaattatctctctcaaaccaagaaaaaaaaaattgaaaacatatgtacgattgggcattgaatagaatagttagggtataaagaaaaggaaagagaagagcaagatggatgcaaaacttaatttctaagtaagaaattttttattttacatttaaaatgaataattttaggtcaaagagtatttgacaatgtcaaatatattgtctggtgattaggttgaaaaatttaagagaaattactatatcctatagatgcaactattgacactgataaaagctctataaccggagagtgaatttcttgttcaatcaagaagataactggctttttgaatagccctacaccagtaactactaccaccactcacaacttggaataccaaattttatcaaaacaaaccagaaaataaggagtgcaactacagtcaacttatcaaacttctattatttaggacttataaactgaagataaaaccatataaaatataaaatgagaacaaaactttattttattttaaccttaggttgaaggaaatgcatacatataagttcggtacctgaattcctgcccatcctttgcgaatattgtctatcggtttatcagactcgtttgcccaaccccacaaggtcctccggttcttgctgtggtcaaaaaacgacttggaagcatagaagttgccataatcatacctaagtccgccccaaccatccactgaagtgttgtcatacacatatctatccttatcctccagataggtccccgcagtgtagtaatcaaacttagtatcgtcaaggctgttcaatacatgtttcacaggattccccactacatttcctataactgaaactgggtaaaagtcggggcactcccacatacccgtaccacccttggaatggatagggtgtttggcccgttcccacctcatgaagtccttgctcttgcatagataagctattcctttgcgcttccttacactgcccaccagcatcctccagtgaccatccttgccccaccaagctgttgtggggtcacgaaattcagtttggtttacatctttatctaccacaactgggttgagtctgtctggtttcacccatttccgaagaagtgggtcatttgggtcttctggttcggcatagcattgcacttgagttttattttcgtctataatagatggtacactccattgtagtacattgaccctgcattgtggacagttaaaagtgtaagacggtgtatacaaatatatggatggttgtcattgaaaaattaaaagtaaaatataatagaattataaagttctggcttaccatttggatctgcatgtgattgacgcatccttacagagatataggaaccatgaaaggattacatgcaaaggaaataaagttatattaccttgattggtaatgaaaactaaaattataaaatttctatataatatgaaaatatagatttttttcccatagataaactctcaaacatttttagtcttgtatcaagatagattctatatatgatagcatgagatgtcaaaataagtaaaagaagcacttattttattgtaatattttnatagattctatatatgatagcatgagatgtcaaaataagtaaaagaagcacttattttattgtaatatttttttaacacattttaatgttttacaaatggctaaaatttcacatttcttattaaaaaaaggaaaatattaaattatactgtcaaacttgttacacaatgttatcaaaattcagtagtagcctacttatttgatacaaatgaaagaaaagtttcatctttaacaattaacctactgcaatgatgtgcaagagtatgagtgaaaaaatcataataaaattattgcattatgttgcacttttcattccaatcgtggtttcttactccacacaataaacattaaaaactattgcatttcatctctttcccttccatctctttctatcaattatcaaaatagcctaaaacaagaatggcatttttttgtatgaagagctagactattgattgttaattaaaagtgtaggcaaactaaacacaagcattaacactaaaatcctaaataggcaagaactaagatgggatagaggttctaataccatgttagattttagcttaagttcaacagatatataagctacaccctaagaaccaaggcatacaatgtgagactttctaacacaaatatcatatacaccaagtgatcgagtacataaaaccagcacttccagcacaccatacaaaccctaagacaaattaatgcatcttgacaatggttttaaattgtggtcgcggttgtcattgtggtaaatcaaaaaatctttatatagaggccaattgtggggaaaatgtggctgatgcagccgcaattgcagtcacgatgcatttgcaaagagtctaaatacattgatgttgcagagctgtggttgcagaccgctattaaaaaccatgatccagacttaaacaattttgagcaatattcatagcctattgaaaacccctacagaatgatgtccacgaaagaattgaaagaagcttacaatctattcatcctgtaattacccttttcaatgggacacagttgctttctagttcttaataatgcagatttacagtcaattattaaaacagaatcacaatttattttgtatgaagagctagaggattgattgatacaaaacctgtaagcaaactaaacacatgatgcattaacactaaaatcctaagtcatccagcttacattacattcacaaaaagagggaccaccaaaacaatcgattcaaacttatctgaatatgatttactaaaatgaaattacttagtattttgtaaagtttccttctgaaatcatatgccccaagggcaacgtatcctaatctaggtcaattcattcatgactgaataatttccctcattaacactaatatcttaagttgtccactgccctacattacatatacagaaagagcggggccaaaaaaatcgattcaaactaatctgatctatgatttacaaaaatgccattactatagtattttgtaaagttgccttttgaaataatatgcccgcagggcacaatattcgtactctattgaagacctctactgcaatatgtccacaaataattgaaacaagattacaatctattcattagttcatctccttttcaaagagacacggttgttttctagttttttataatgcagacttactttacagtcaatgattaaaactaactacagaatatggcagatatgcaaaaacgaaaatgcaggtccagaaataaagtcttcatactaaccgttcatccagtttttaagaggctggaaatggaatccagttctgtgataatctcctctcaccgaaaccgcttcaatgcaattgttgatgatcagcaacactatggagtaaaacaccacagacatcttggtgtttgggagagccatctgaaaaatggacacccaaagataattaccaagaaaattcacaagtcacaacaagaaattgaagctttgctggtacatttggcagcataggaacaaaggcattttccgtcagcaaataagaatatatattattaataggggagtacttctaaatcgcaagatataaaaagggaagcagcccaaaaaaatacaaagaccaaaaaggtcccatgataaacacaaaatcaagaaaatcagtcaaaacaacagcaactcatcagaggaaaaactgaccaatcgtaaaaggagaagttgaccgaggctttgatctaaacactattgagttcactaccctttgattctgatttggtcttgcagttcaataagtggtgcttgttcacaggttcattgagtcacttagtgctgctattggatatatattctgagatataggggatcctgtcatggtatcatttgtttttcaattaagtttcattatttttattgcattgagtattattataaaagtggaatcggtgattccatacgaagtttccgaatatggaaacttgaattaattaaatgctttgctatgtactgtgagtaattcttacactacctagtacctatatgcctgctgtgaaaatcattttcacaccagcatgtacgtactactaaaattactcgatatatagtcccagggcagaaagggttgtagacctggattttaataaaataggtgactgctgtatgagatggatacacacacaaataaatacgtttgccaatattagcataagcttagtcctttacttaaatggatgcatataataataataatatgagagcaacatttcccccatattaacttcagttggaccaattgagatcacaagaatattttggtccccagtccttttaaccattctctgctgtgcttccagctagacaaataagatttttgaagataggtaacagtaatgttaattcctcttgagatcacaagattgttcccaacgtttgacgcctactttgtatgaatttgtaagctgagattgcttttaactacaaaaattgattaaaatttttaagataagagtttctaaattttgttataaaagtttgaaagtattttaaaaaaaataaataaatattttttttgtaaaagtgagatagataattatatatttttatggatattatttctttattttttcttctaaatatttactaaaaaaattgtacaaactgagtcctaatatcatattatttctaagaattattggtataaactaatggattgaaaggtatttagatatgagggatcaagtcttctattattgttatatataataacatgttccaagagaaaacaagagctgacaaaattagattgagagaaaataaggaaaacatcctatttctttagctcatttggttgcacacgcaaaatatgaaaaagaaaaactaactaattaatgtgagactcacatgagagttttctctgtttaagaaaagttaaattttgagaaaataattcacttgttttaatttattcatctacttatctttctcatgagatgtaaggtccatttgattccattcattttgttaaggtaaacgacattatattacttgctcatttatttacctatttttatataccataagtttgataaaaggaaggttaatccttaagataaaactaaagtccacctccaattagttagatctaatagaccagcaaaactaacatttgtttgagatataaaataaagataaatgttacatgtacaatggagagaaagagaaaaatttaaatgtaataaattaagtgatagggagatattatctcaaattgatattgtataaattactgtatgaattgtcttgtgtatcatatttctaaaataaaagccatcagcttatactcaccatgctttataaaatagttcaatttaatttttgacttaccatacaaattagttgtaaaattttactgtactcaacttttataaatatcnaatgatgtctaccttattctgtcaaaaaaaaaaaaaaatcatgtctatctaatgacattatgagagttgatgtgcctatatctctctttgcaatcatatctatatttaaatgacaaattctgtgttctgttattacgtaataggtaggtttctaaatttctaccagttcaggagctagcaggctagtatttaatagtagtagtacgtaatactacattaaatacatgattaaattgaattcttattcccttctgtcttgtatcaacaatggtgatcaattgagtgttaaaaattttctgatacggtgttcaatttctatagatagaaaaatggtcatcaatgctacacctgttaatgtcggaatattaaatgtaaagcagaaaataagtgtctcaaatatgtaaaagattttgaagcacttaattaattaaagaacaaacttcgcccatgtgtgcttgcatgcatggtttgtctcaagtcagaataaaggaggaaagttgatgtcagacattgcaaaccggtcataaaaaacagctatttttatgatatgaaccattatgatattttgttaggacatactcttcatagtgacgcattatatcggatcccgagtatagtaaaaaaatgagttaaaaccgttgccacaaggtaagatgctgcatcggtcccgaaatgcggttataagtgattttccattcaagtcatcctcacaagaagtagcctcgagcagcaccacttaccgcatcttctgcaaacttggggtctccaagttccaaagattgaatggctactagtacaatagctaccaaaatcgttttgtaactgtcaatgcacagcatgtgatatcagcactaggggcacgagggtcagctattagggttgaagacaaagattagaaattggtgttctcttgcaagtatcttccatgagtttcacatcgattagttgtaacagtctacaatgagatgttgacattgaaatgatgaccacaataagaatgctanccccccccccccccccccgagaagttgattgttcacggctacatttgctctggcttttatgacatccaccatgatcaatgcacagcatgtgatatcagcactaggggcacgaggttcagctattagggttgaagacaaagattagaaattggtgttctcttgcaagtatcttccatgagtttcacatcgattagttgtaacagtctacaatgagatgttgacattgaaatgatgaccacaataagaatgctacagattagagaaaggtacttcaagttcggcatctttatagaataagatggatgataaaagtgcgcttgtgttgtgtggaacgtcttattctttccaccttgttgtgtgtagagtcttcagttataaggcataatgcggcccgcaaacaatatatattcataaactatattatgtatactcctatatatgagttatctcttaccaatcaaagatattattattaatactaaatcaaataatatagatattttggaccaaaattgtaaattttctatatttaatttgaagactagtagatttttctatataaaaaatgacaactatatatataataccattaagacatgcaatgactaccacttgaagtagcgatattaggtaatgcaaaggaaaagatgcatgttaaattaaacaaataatgcaatgggttgtatctggttttcttaattttcataggtctaatcaaatgcaattttgtttcaattgacaaataatcgaattgtatacatttggtttagcatcttgattttaaatttcatgcattttaccacccaattttttctgtagattttactatcttgttttttatatttcacatattttatcatcatattggtaataaacaacgtcatttcacaataaatggtgtcaaaatgatgtcatcttttaaggagattttgacatttcatcacacatttatagggtcggaaaattgcacaaaaatggaaaaaatgatgcgtagaagaaaaaaaacttgggtgattgcgaaatgataatggctaagtggtaatatgtgcaattaagcccaaaagcataaaagatagaagtttatgcataaagaatacaaattggagtgatagtaaatttactcaaaattcaaatatcattataattataagaataacaactactatcataccaataagacatgcaaatactaccctttgaagaagtaatttcaaaacaatgagaggaaacgatgtatgttagatcgaaacaatatagatcatgaaaatgagaataaaatatactgagaagtacatgaggcatgaaaggaaacctgataattaaaggttattggttgaaaataaccaattgagagtgtgttggcaatgagatttaagatgatagctatcaccgtcaccaattgaatgattaagcacccaagatataaggagttttgatgggagatgtcatagggatttggagattgaatgaagattttctcctaaattggtaacggttattggttgacagtgagcaattgagagtgtgatggcaatgagatctaagacgattcactatcaccaattgaatggagatgagttatggatttgatgggagagtctgattaagcaccagagcaataaagagttttgattggagatgagttatggatttgaagattgaatggagattttttccaaattggttaatatatacacgtattagtttgataggatggactttattcactttttcaatgccttaatgtgagtcatgatcaaattcacagtttaacattaaataaacttaacaaaactagcaattcaacctgacaagggttttaacgtttggattattgagttttttaggtatttgaaccatcgatatctagataaatcattaaatatttgactactatttatggtaagaatgtatcaataatggactttaaaattctttgacaagctacagaagaacaataaaaatacttcattttatactgatttactcaacctgagttacatccagttctcttttaacaaccagtaaacggttctactaatcatacttgattacaacaaatattttttcagtcacttctgacttaagtatttttaaggtaactacttggacaatccttagactagcttcccctaaatttaagaacactcaaatattattttattaataagtcactcctgactttcaaaaatagaagtttgatatagaatcagagattctttacaacactcaaagaatgaagttctaatctctcacaaatactttgtatattataaagaataaactctattatgctcaatgtatttctctatagatgtttatcttttctttcatttcttgatttacaacccttgttttcttgtacttgtttgtttttgttcttcaggtcttgatgtcaagtatctttaggattgaataatatgactattgtgcagcttgatcttgttttctggaataagcagatattgcgcatctttgtctaattggatcaaaacttttcatttgtcattcataactcaatatagtcgtaatacttcgcaaacttattccttttaaaatgaatcatataaactgacataaattgataattcaaataaacgtgcatatttcaatcagtgtttggatggactaaacgagtaattccagcttctagttgatgaaatatccattaatggataactctcgcctggtgttgcttccagtcatcacatctattgacttacatgcaacaagttggttaacacaaatttatatcattatttttatcaaaaccttcagagatgtttgggtcgtctagtgatgaatcatccggtgcctaacattgaacttgggcgtagctcaaccctacaaaactggcttgtaaggtaagagttgttcccacttatatactttaatttggttatatcgttattcgatgtgagatctctaataggaccataacattatttctccaagtttttattaatgcagattacgagttaagacgaaaccacttacacctatatgaacaagtgtatactatttagttagtagtttaaatgttatcttttttaaaatcaaaaatagaatatactaaagagaaatggaaacatagcaacaaaacatggggagaccaatcccatacccatgaacaagaaagcaagataaccatagcaaggaacacctatgtcattgctaggggaatccttcaaacaagagggaggagcataaaacatcaaaaaaagcataaatgcaccatcagactatagagatacaagctctaaaactagagatggcatcgattcttgctagataaaaaagagaaattattttatcctggaagtcttcttttgatgagtggttggaaccactttgatgttggttgatgaggcagtaaagttgttcgttgttttcatatctatgttatcattctctacctgattcccaaaatttgccaagaagatggtaaaggaaacccactttaagccttacaatgaggaacaagcatctaatgaaagtggtcagtatgcacataaaggagaagaaagtcaggaagcttatgctccgaaggttgatgattagaatgaagttatccacccttctcaatttggagatcatatatatgatgttcttgccaagctgaggacaattgactcaagcttggaaaaggaaaaaccgaaaaaggaagaagaaaagaaagaggaaccttctgagattagtgttgtgaaaactgatccaaactgactgatcggactggtccaatcggaacccggtggcatgacagagccggcttggttattgaaccggacgtgcatctggcccgagatgacccagtcgattttgcagcaaaccagtgatccaacaggtttttgaaacccagtctaggattcgctttcacttcacgcactcggcttctcacacttcgatcctcactgccaccgtcatcgccaaacagaaaccagaactagaaaggcagaaactcataccaaaaatgaaaccaagagcacaaagatcatgaccaccctctacacgctgacgttaaccaacaagagcaagcccacgatggtgtacaaaaagcccacagcaaagccctttgcaccaagtttcatcccagagtcgtgggtctttgcagttgacgagaaacataggcaccaaaaacgtggggtttcaggttgcagcaaaacagagacgggcggtggatgggggccagggagagaagagtatatgaactacgaagacaagaatgcatatgttggggattagggcttttttagttgggccagaccagatattgcttcgtgtacccctttaattatatcctgcagtttttattttgcatttaggcttctgactcattttatttattaaaaattggacttgttttaatttaggtaatggctatttctactctcttttattattaatacattttttatttgtgttattaactttaatatttcaattattattttgaatttttgagaatgaaattatgaatggacttttcttaataaataatgttagttatatacgtatatataatataattttgaattttttaatatagaccgggtcaaatcgggccaattactgactcactatttggaccactaacccattgactcactacctcgaccgagtcaatgatcgggcctggttttataacactatctgagatagtaggagatactacataacctagccttagacaaaacactaatacaccattgtaccttcacttagtatatatgaagcaatctacatcaaaatgctatgtgctaagaattgatgaagttgtgctacttccaaaaggcatatcaattaaaattcatcaaaagaatatactagtgttacggattttttagatggacttagtgataaggcccattgggaattcaaatagtggactgttgaccacaactgcaaataagatcgtggatttcaaagataacaacagaaaggatcgtaggatcaaacagttaaagatctcggccatgaatatcggagagaatattcaactgaccagagttaatttcagtataaataaagaatatatttaaaggaaaaggtacacacccattcgatcccttttctctttccattaacactgtgcatagtgatcgtactttttgcgggtatttctcttctacgaatacctcaggaaagagcttgatccaaaccccactagttgagtattgctatgtgcatagtgatcatactttttgggggtatttctcttctatgaatacttcaagaaagagcttgatccaatatcaaaattacctgcatctttgctggacatttctgttcataaaagacagaacattggcgccgtctgtggggactataaaattcaaatcccacgattcatgatggttaacactagaagcaaccagactctaccaccacattctgatgcaccggggagaggagattgtcccccttgtgaccagaatgtgattcatcataaagatgtgcatgtgactaatgcggtttcagactcagcctcgtctcctgctccaacgggacaggcaattccagatgctaatcagccctcatctcccgttccaatgggacgagtatttcttgacacttatcaaccgaacccaattcaacatccagtggctatggcgacccatgaaccggagccggctgaacgactcgtgagtaacactctaaattcgatcttggctcgaatagagagtatggagagaagatatgcccttcaaaggcacgaggacatcagaaacatcacgttacagattgaggaacataatgcagaacggaaacgtgaggaagaacgacgtatacaacgcatggaacaatgcctcaggaatatggcgactctggtccataatgaaaatcccggacaataaagtagtcatgcagctaggaattgaacaagtcaccatgccaatcaggtctcggttgttcccacaaattatcctgctgattcagaagtgtaaaatataagaacacttcacacttaaccaagagggggggagaattggttaggcttggtaatttaaaaaatattcttgaattaaaatcagagtttttccttttgtggatctttatcacttttgtaaccaagaacccttattcaatccaaagtttaacccaagatatgtaatacttcaagaacttggttgatgacaagaacttacaaacaagaaagataaaatacaacaaattagaagaatatgaacagcacacaaagatttatattggttcacttcaaacactatgaagctacatccagttttcttccactcaacactagaatggagttccactataagaaatttcagtttttacaagttattacaaagcctctatttatcaaccctagataaagttcagaaatctaaaacactattagattcttagagacaacccactgagaacactactcagtacatcccctagagaaaccctatctctagattacaagcaagaaaaccatttacaatagacaaattaaaataaaattcaaaccaaaattacaacaacaaagattaaggaaagaagtcacctgatgatccaatgaacaatatgcatatgaatgattttaccaggtataagaatgattgtagccttagaatatgactttccttaagctttggcaaagaaagatcttgcttcactcaattctcaataacccataagtgtttggtgaaagcaagaactcaatgaacccagaaaaccactacaagaatatctagaaagccttcaaatgctcagtgtacgaattgatcaagttagcaaaaacagctgagcatgggttctatttataacagttttctaactgtcagtaatcgattacatacgctcctgtaatcgattaattcgtatatgtaatcgattatttcaagactgtaatccattaaactattcaacagaagttctgggtatgagcaacgaacagaataatcaattatctcgtcttgtaatcgattaagacagcaagctcctatttttgaaatacactatgtaatcgattacggatcttggtaatcgattatgtcaaggagcttcataaaacagtatgtactatgtaatcgattacaaaatttggtaatcgattaatgcagtgaaacatgttaaacataggcatataatgtaatcgattactatctgtggtaatcgattaagtcagtgagatgatatttcctatttagcctatgtaatcgattactacttattggtaatcgattaaagcattcattatatcagattatatgaaattctaggtaaaataatcgattaatccgatacgtaatcgattacattgttcttgaaatgttttccagaaggcacaaagaataaaataatcgattcttatttattgagtaatcgattaaaccagcaaggacatatttttccaaaaactttgattaaacttgcttattttactaaatgcttgtgtatattaaaacttaattttgattagctgaatgaatgatatgaatgctatgcacatggatcatcagaaaatacttctttctttatattaatcataacttgatctccaaagcttcaaagcatgttgaaagcacaaaactaagctcgttccatttgttcattcttcaagtgattcctcttttgtatcaacaagaaggactaggtagtcgatttgaaatagggggctcgtctcgaatgaacgttcgaaatgacaacccggtgcgtcatgacaatgagaacatggtgaatgtacaactgatagttccaaaccaaccaatcaatcctgagatgaagcagccaacatgccagccccggaccgaaaaccaaaatcccgctattgaagttacgccttggataaggatagaaggtggagtgtattggaggaaatacagtatagggcaatacaacaacagtcctttcattgacgagatagttaatgcccgctatttggatggttttgacggttcgtttttgtcaaaatatgacgggagctaggatccacaagcacactgataggctgctagcatgtagtagtttttaggttagttttattaggaaataaatagaaaatgtcaaataaaggatagattaaagctaaatttcattacttttgattcttttagtaattattgttattttgatctttaggagcaataaatagaaggaaagaagcaaaataaaggagcaattgaaatcatcaactcacgcggatcgcgccagggcagcgctgatcgtgccagacccactgcaagtccacacggatcgcgccatatccgcgctgatcgcgccacagtttctggaagctggcgctagtcgcgccagactggcgccagtagcgcgggcgttacgggaaatctgaaaactgaagaagataagataataacaaaaagatactagggttatggaagcctggctataaataaggacgtaaggggacgttctgaacacacattcgcatgcagagacatacagaaacatcattaaacacacacggaggctgaaaaagggaagatcgagaagaaagcgaagattgaagggtttgattactgttcttctttgtatttttactcatcttcttcttcatatttgtactaagctagacataattatgtctagctaattcctctttgattgtggtaaaggccaaaagccaatgtgaactcttgtgtgaattgggttgatgattaatgaatgttattatgattgcttctctttatcttgttcttcaattttaaattccattgatagaattgatcactctattagaggtactaagggctttaattcacaatagggatattggggttttagtttctgaaagcgataaagtgacagtttgacattacctagggatagggatgaaggattgcaaagtttttatatgctagcttaaagcttaatccaaaagggggttactaagggattagaacacttaattaggattaaagggttaaaaagactgaggaatctgggtttaaccaattaattaaggcatatctttgagtagttttaataattgaaattaattttcaattcaattaatcaagtagggatcaaaggtgcttgtgcctttaccgcaattactctccattactgcatcactttcctttttactccaatttaattctgttttcaattattttccaaattacaacacaaaccacaaatcaaatttctttctatttaatctcttccaattttaagataacaattacaattatcttagtgcctcaatcctcgtggagacgatactctacttatcaaaattattacttgaacgatcggtacacttgccgtgagttacgcatcagtttttgatgcaacacacacatagatgaatttgacatgcagatgtgtgtacgaggaattgatgaaccaataatatctcgtatcttcgttactactttatccggagccactcagacatggttccacacttttccgccgcggtcgattcgtaactttgaagatttcagtcacaggtttttgctgaactttgcgactagcaaaaagcaaccgaagtctgagttcgcacttggaaagatacgacagaaatccagcgaaacattgcaaagttatttggattgattcaaggaagctgcattgcaagtacagggactaaaagaacaagtgcatgtgcacctcatttcggccgagttgagtggatcatctcgatttgcaaaatcaatacaaggactcggtaaaaacattgatagagtttcgagcccggtcaaaaaagtatttggagttagaacagatggaaatagcaaatgcggcaggagagaaggaaaggagttccagaaagaggagtccattgccgaggggccgacaacatcaggagattcctaatcaaggcagaaatgcggataccaaatacgagaagtacacgccattgaatgtatcccgatcacaaatttggagggaggtaccattgactgacatgaagaaggtggagaggcctcgaccattatataataaggccggggtggataaatctcaattctgtgagtttcacaacggatcagggcttaccactgatcagtgttggaacctctgagacgctattgaaaaatttgtcagagaaggaaggttgaggcagtatgtgataaagacccaaggtcgaaggaataaacgtaagggtgaagaagctcaacccgaaaaagaaaaggaagacaagaagaaaaaacataatgatgaagatgaattcctcgagccagaatttgaatgtaatgttatatctgaagccttgggaggaggaggagacactgccaatcaaagacgaaagtacctgaaagaagttctttttgtaagggagcagcccaagtttaaagtgaaagtcggcaaaccaaaacctcctattctatattttacggaggaggatatgaaggatgtggtctcaggtcacgaggatggcctagtaactactagaacactggtcaattgccgggttaaaagaatgtttgtggacaatggtagttcgacagacattattctatggagtgcattcaaaaagatgaatttggacgaggaggacttaaagccatgcaagacaatgttgataggcttcaacggaggaaatactagtcttaatggttctatcgacttacggatgacattacgaactaaagaggcattcaagtcggaaagagttaaatttgtggtggccgactttccttcaccgtacaatattatcttgggaagaccaactatccataagtgggatatgttgatgtctaccaaacatcagaaaataaaatttgtagggaacaaggatcaggtggtgacaatcggcagagaccaaaaagaatcctggcaatgttatcgcaatacgattaaggaaagtgaaggtggtccatcttcaccaccccggatacgtcaaggggacaaggtgggccgggaaatagtggaacggcagtcagggaaaacccatacacatggtagaactcgacatgagaaaagattctgaagaatgaagaccagaaccagctgaaaatgtggaacaagtgcagatagggaaccaatcgtggcaaattactaagattggaaaaatggtggattcaagcgtcaaagtcaaactcacttagtgactcaaaaagaaccaagacgtgttcacttggaaaacatcattaatattggggatagatccaactttttgttgccacaaattatccatgtaccccggatcaaggtctgtccaacagaaaaaatggaagcttggtcctaaaagaactcaaacattggccacgcacattaaagagttgttagaagtcgggtttatacaggaaattcaatacactacatcgttatccaatgtagttatggtccggaaatctaacaaaaaatgtagggtatgtacagattataccgatctgaacaaagtatgccctaaagatgtctattcgatatcgaatatcgtccaactcgtggataattcatccgggttccggttactgtcatttatggacgcttactctggatataatcagatagccatgtatctagcagatcaggaaaaaacggcttttataggcgataaggcaaactattgttataatgttatgcctttcgggttgaagaatacaggggctacataccaaataatgatgaataaagttttcgagccccaactcggtcaaaatattgaggtttacattgatgataggatcgtaaagacagctactattgatgatcatataaaagacctggaggagacatttggcaggctaagggaatataatattcacttgaatctgcttaaatgtggatttggcatgtcagccgaaaaattcatgggcttcatgttaacccatagaggaataaaagcaaaccctgataaatgcaaagtcgtgttagacatgcaatttccaacaagcaagaaggagattcagcaattgacaggaacactggccgctttaacgcactttcttctgaaattagcaaaaaaggcgcttcctttctttaagttattgaagaaagaggctgttgtaggatggaacccggattgtgaggtcgcattcacagagataaagagatgtttggcttccccaccggtgttgtcgaaaatagaacccggggagacattaatattgtacttatcagtatgagtgcggttctggtaagggaagccccggggagacattcacctgtttattttgtaagctgggccctccgaaattctgatttatggtatcaaaggttggagaaggtggcctttgccttgttgataactgcgaataagttgcgcccgtatttccaaagccacacaataattgtcagaaccaaccagccaattctacaagtactacacaagccggatttgaccagaaggatgatcaattgggcaatactattagaaattttcctttatgtggacaatattaattaataagttttgtattttaaattaatttggttaatggatattccaattttaatattttgattgactcattgtgatcatgttgagttgggcttataacatctgtcggtattgagcctagttgggtagcaatgtaggcattagtgtttgactgggcttctatgatgggtggacccatcagacacactgttgattaggtttttgctaggtcccctctctagcctatatatagtggggttaagtcccatgagccataatgctcccatcactgaaggctgccaatttctaaataggcaatagagaggaagactctagcatcttgttccctcgtcttctcccgcttttcttcgattcagtaatgacccaacaaggtacacataatcacaactctgatttattgttatttggtgttttataatcatatgcatgatccgtcatattagatttttcatttggtatcaaagtcttgtgtatatgattatagaatccatgttgttgattggaattaatcaagaaattgggatttttttattcaattaaattgagaaccttggggcatttgttctacatattgagacctttcaattaatatatgatgtgtatttccatggattatgaaagtggaatttttattcccaaattttagggggggaaaatccccagatttaattcaccagtttcacatttttctgttcggaatttcgtgaaacaattgttacagtcaacttcacattcccatattttgagtttcatgaaatttacaaattgattttaattacatgtgacgcctttatgttggaattatggagatatataatttataaaatttatctactcaaaggggataaattttagacaattatatatgattttctccgttattaaatcttcatatgatgaaaaataattatatatattatattctctctctaacgaagagtttatgatatttaattattttgttattgctcatgaataatttttcatgtcagttaactttgctcttaacatctctctgtgcattttccttttctataattttcacaaaattaattcgttgttaatcatgggttttcttctcgctaaaatattaatatatatatatatataataagttattgtattaagcaacaccataatttgagtaaaaacaagtttttaagtgataagtctatataaaatgtagattttatagagtaatgtcatgggagtttagcgtctagttcataagaaatgtgtgacaaattgaaccaataataaataattcatgtagttaatatttgtgtgcttaatcaaaaaaaaaattgcataaattgtgattcactgttcatgatttgaattctgaattcactattcttatctgatgaattgttttggtttcaacaaaattgtttcataaatatgaagttttagtttcaatgaatttgttgacactatggtgtgggttgctttgtgaaaattttaagctattttgaaagtttcaatttctatgaaataattattaaagtcttgtgcatttattgttgcatgaatttgaagaaccagaaattgtgcctaatattgggtttattagtgaattaatttctgatttcactttaataaaggaattactgtcatttattattatccttgcacaattatgctgctcatgaattaattgttatttgctaatgttttatatatgtgagcttaaagtactaaagtcttgcccttagtttctgtgttatttcgtatttgaataaacttggctaactaacatggattttgtaattggtattgtttatacacatatgtctggaattatttatgtcgcttataagaaatagttttacatgggtaggttccacaatttatgaactttggacttttgtgaactttctttttcaactatgcatcttttgtgaaatacactttcggaatggtgtcttttagaattctagtgaattattttattcaatgctaacatgaattattttcctagttattatcttttatgtttactgtttcaactaatgcgaagttagctattattgtttaaaaaaaaatcaatggctggctgaaattattagtttgttttgactgattttcatttttgaaatattttggattgttagtgtgaattgtgtattcagatttgggtattattatttattgattcttgaaatccatgagaactttcagttatagtttcacttttgggttttagtgaaacacttgatgttgtggaatcaatgaattattattttctattggattgagtctctctctctttttcttttcaatgtagattgaaactgttgattggatctctacattttataattttttggaccttagtactattcatgtactgtttaagttttgaaattcctgaaactggtacaattgttgttccaataggtgttttttggattatttcacttttgtggaagattacttgtctatgatttaatatcttacttttagaattttgattcacatttggtgctataaattttagactattatatttgatttctaaaaacacatgtatattgtgaagtgtttcatgttgctagaaacacatgttgtgaagtatttcgtgttgttagaaacacacattgtgaagtgtttcatgttgttagaaacacacattgtgaagtgtttcatgtttttcggaaaaacatgttgtgaagtgtttcatgttggtgggcattgttgttgatatattattttcaaaaggggataaattatttttaaattacatgtgaaattatggagaaatatttataatataaagtttgtttgcccaaaggggatgaatttttataattatatgttattctccttgttgtttaaatcttcatctgatggaaaatatttgtatattatattacctgcccaaaggggggtttatgatatataaattattttgttgttgcccaaatttattagtcatggaaatttctttgtaaatttgaagaatgcttttggttatttcatgcaatttccggcccaaagggggttgttgtgtgttttaattggaagcttgtctataataaagttattggaggtaataaagttattggaggtgcattggtctaggtgatctgtctgcccaaaggggatagttctctgaaaccagtgtatgctcgttgatttatttgtctgaggctttgtccttagtttaaaccttggtatgtgcattgtgtccaaaagggatctattgttttgctggcctcgttgtaatgacttgctttgttaaaagctatattttgccttatagtttattttaatgcattcgttttaccttaacaatgaatcttttgtaaattcctttaaattaatttaaatatatttgactaattcatctacatgaaagtaagttggagtaaatatagtttcatagtactttatgtagatgacattttatttttaaataagattttgatttattgaatgaaacaagagtctttcatctataaatctttgataggaaagactcttcgataacttttttgagtgtagaacaagagtattttatattcagtgagcttcattagtgagagttatagaggcttacttttgaatgttttagattctttcgattccctttattagtatgagttatattcggtttgcatagaggcttgcttttgaatattttagattctttcaattcctttgatcagtaggagttatattcagtttgttttttaagtcacttttgtatgcaaactgataattattttgtgacttttgtttgaattttattgatgatcattattattgtttttctcctgttgactgagaaatatatgtatgaaataatatctttaagcatgttgtgagcttaaagatatttggatgtcacaaattttgagatctcatgttgtattgtgacaggtttatataacctgagcaatttcatgtcgtttggaaattgcgttaattcaatttcatgttgttaagaaattggattgaaaagacaatttcatgttgtttagaaattgcggtgatttaatttcattttgttgagaaattgcatcagaaaaagtgtaatttcatgttgcttggaaattgcactaatgtaatttcatgttgttgaaaaattacattgcagaccgataagaattagtgtgttatattgttgatcatattttgacactaattcttactacactattaggccctgattcatgaagatgtaatactcattgtgtgtgagtatggaaagtcatatgctatgatattttcggtatactgatcgccatgttcctatcatgggattatgttggattgaatcgttttgagatgatggaattggaatattatttttcaaaattgtggccacgtaagatgaattttcaattattaatccgatagagtctttttcgaaataaaatgattttcaaaataatattaaattaattaatatagcccaagtgggggaatgttagaaattttcctttatgtggacaatattaattaataagttttgtattttaaattaattgggttaatggatattccaattttaatattttgactgactcattgtgatcatgttgagttaggcttatagcatatgttggtattgggcctagttggacagcagtgtaggcattagtgtctgacttggcttctatgatgggtggacccatcagacacactgttgattaggtttttgctaggtcccctctctagcctatatatagtggggttaagtctcatgagccataatttccccatcgctgacggctgccaatttctgaataggcaatagagaggaagactcttgcatcttgttccctcgtcttctcccgcttttcttcgactcagtaatgacccaacaaggtacacacaatcacaactctgattgttatttggagttttataatcatatgcatgatccgtcatattagatttttcaaatacagctatcggagtttgatttgaaatatgaatcccgacatgctataaaatctcaagctttagcggacttcgttatggagttaaccccaagtagcggtaattcagaaaatacgtggaaactatatgtggacggatagtctaacatgaaaggaagtggagccgagatcataattgaaaactcggaaggggtggctattgagcaatcgcttcaactgaatttcccaacatcgaacaaccaagttgaatatgaaacattgatagccaggtttttacaggcaaaggagcagggagctaagcgggtaaaggtgttcactgattcccaacttgttacagcccaaatagaggggcgatatcaagtgaaggggcctttattggccaaatatttgactaaggtaaaggagatcattgttgagtttggcgaagtaatggtgagccacattcctagagaagaaaatgtgagggcctatatcctatcaaaattggcaagtaccaagagcccaggtaatcataggatcgttattcaaaaggaaatttctagaccgacctgtgtaatgatgctctcggcaactaaagattggaggaggcctatgattgattacttagacaagggtttgttactagatgacgtagtggaggccaagaggttggtgcgtgatgcaaccatgtacacagttatagaagatgaattgtaccatacaggattgcacaccccaatgctagtttgtccgaacccagatagagttgactatgtgttatccgagatacatgaaggaatcaatggccaacacatgggagctaaggtattagcaagaaaggcccttcgagctggatactattggccgatgatggaaacagattctgcaagacacgtcaagaaacgtgaaagttgctagaaacatgccaaattgatatggtctccccccgccaagttgcagttcatctcagctccatggccctctttcaagtggggaatggatttattaggaccatttaaggcggcggaaggtcaactaaagtggctgatagtggcagttgattatttcacaagtggatttattaggaacctctcgccaccatcacgtcaactcgagtgtaaagattcttcgaacgaaacattatttccaagttcagaatcccaggtgaaatggtaacagataatgaaactcaattcactgataaacgatttcaagagatgatggtcgggttccatatcaagcaccattttgcttcagtagaacacccacaatccaacaaacaagcagaaacagggaataaagtgattgtagacgacttgaaaaagtgaatgtttgaagtcggctctagctgggtggaacaattgtattatgttttatggggacacaggactacagctcaaacatctaccaaagaaaccctgtttaaaatgacctatggttgcgaaccaatgataccagtagaaattggccagttatcttggagaagaaagcaagtactccaagaaggagaagaaaagaatagcgaggctttggccgttgaatcaaatttgacagatgagatttggattaatgcacattgtcgagatctgttgatgaaaaaatggcaaccaagaagtataacaaaaaggtgaagccgaggtcttttgagaaaggcgacttagtacttagaagggcggacattggaaacaagaatgctcgagaagggaagttagcatctaattgggaagaaccatatcgggtttcacagaaactcggacaaggagcttatatgttggaaaccctcgatgaaaaatgaataaaacgaacatgcaacgcagataaattgaaaatatattacagttaaatccgggttcaaagttcgattggagatagcaataagtcatagacatgacacaataaatatttgtttcctttgtcaaatgtagttcctaactcatgtgtttctcttttagtgagagtatgagtcgtggtacaacaggttgtaaacccagaattcatattgttctttctcattaagatcatgagttgtttgtaatttgaccatgaatcgttttatgaaatttatcaataaataaagtattcttatctttatggtgagattaccaaattatatgtgtggagttacatacaaactggtacaatacttagtgcgtacaagacgcatcataattgatattatcttggcaatgaacgacacgctattctaaccctgatcaagttgaaatgtaggaccattaacgacgaaaattaatgtccacatatagcatgttaatcgttgttaggatcaagtccaagtaagacaacctggaacgtgttacaaagaaaaataatttgtactgtaaaatacttggtcgttgaaaccaaatgaaaatttatttagcatgcaaagaatgttggccaaaaattatgataagaatccggattagtacaggttcacacgtatttgaattataaaataaatagtattgattgcaagtaaaatcgggtgcaactcgacaatgtttcgaagacaataaacttgaaagaaaaattacaagataaaccagcatcctggcccttcacaaacttatgttgtctgggtttgaacctaaatagtagaagtcacctcttccccttgaggtaaatcctcatccactgggattatcgaatcttcacaaggagaaggagggatcaatttgtcgttatccacataggctttaaagtgcatgcctatggtattcagttcaagccccgggttcagacaacgtatttggtccagtgtgttgttgaaggattcctttgcgttcatagccaatgcctccctcatcttaacagcctccatctcggccttatgtaatcgggattcagcctcccctcactcccgttgggctttttccaaaatagtttttagttcattgaagtgcccagtcaggagtgcattctttttctgggctatttccaaagctgtctgggcatcctcagtggtatccaacgcagctcggagttcttggcgacgagaggcaatggtatcctacgatgcaaggagctcttgatgggttttttggatctcttcccgtgatgcatggagctcatccagtagcttgtcgtgactagtcttcaaagtggccaaactttgtactaaggcagcacacttaaaggcattttcctggatgacgttgagttccttaaggtcatcatgggaaagagggcttgaatctgaaaagtgccttggagccttgacaacgcagaccacgtcatcattaactcctttctcccaaaggcaactcggggacgacctggaagttgtggtagaaagagtaacagttgtaggagcaaggaccagagggggaagatcggaagacacagtgtccgatgacgcagtaggtgtcaggttactttgatctattgggggtgcctccaactgagttgtgtcagcggtcttgtgttttttccccttttctccccctaagttaagataattgggaagttgtcgcttctttgtgggattgggacgcttggcggttggctgtctcggtttggcagcagaattggctggagcaaccaccaccggagcaggagaatctgaaaccagggtcccagcagatggagccaagggagagggttgtggtcccatagtgtcaactgcaaatggaaacaaaacggttagagcagattaaatcatacatcacaaatcaaagtcagacatgtccatacttaattcgctgaagagcccaaaatcataattgtgaatatatgaagcaatatttagcagtctgtgagcttctctatatgccgaaatctaggccactgacgaagcgtcggaatctgacaagttcgtttcttcgaaatggtaagaggcgggtggtcgggaaaaagaaccgattgtatgggaaatactttaggattaaacaaaaggattagcaaataaaaatgctaatgctacaaccagtctataaattgttaaagcttccataaaagctagactaagcaataaagtaccttgcacttttccctctgccttcggttgttgtgcaatctcttctacagcttgccctgcagcagtgccttgaccaaccccaagattaggtggggaaggtcatagtgaagtcagcaagttggaaagtagccacccctctttgattgtgcacagccctgccacgttcatgatgggtatgggtccaatagagtggaaacttccattctacatctcgcgactctggagaagaaagaaagaaaggttgtttgccgggttcggcaataaccttgaaatacttacttttgaaatgtttaaatgactctgtatagactgtgaaaagtttacgatctgaatgaccccggatggaagtccatccctgtttgttagggtgttctctacccgtcctagcagtatgcaccgtgaaataataaaagaagagacgaagtgtacaaggaattcctaaatgctgacagaaaagttcaaaggattgaatgaaaccccagttgttatgatgaagttgtgagggagctatatttaggtggtttaggacttgcatttgaaaatctgaaaaggggaagcgaatacctaaacgggtagttacatctttataaaaaaagaagaaaatgcgctcattcccttcccggaaagaacagatgggttcgtctgggtcaagggcgaggacacaaaaatcgtcttgatttccaactgggagcgcagcaacgcttcctggatctaaatcagaaagggtatgtaaaacctcatgggtgacccacggaaatttgtcaactaaactcgaagagaggttagaatgtgacccgacggattgagattcagcaactaattctgatgatgatgggtccataattacctacgacaaaaaagccatagtaaagcaacgacatacctgaagatatgtcgatcatgagaggaggggaaggatcatccaagatgaaaatgatgtcatcgggcttcctagcatttgggcgaagggtaggaggatcgctctgtcgagaaggttttgcttttggtaccagaactgagttgtgccgacatgatccaagtaccgaatcagacatcaaattgaacccagcatttaaatgataagaactttcaacaacacagtcaaaacacggatcaaactgagtttcaaagaagtctttcgttctagagatgaagattgagtttgtagtgtggggttcaaagttgaaaatgaaggattgatggaggaagcctttaacttagattggggtttatttcattttggtaccaaaggagcattatgttcaggaatgttagttttcttcgtggcagaagaaccaccagaatgtgcacgcaggaggtctttttccctttcttcctctgagagaggaagaccaaagaaccaccatccaaccttgggggtaacagttttccgtatatgtgcttcttcttcaggagtgagttgcatgttggaaaaaggtgaaatagaatctcacgcagggggatactaggaaattttaagaatgatgaatgaagaaatgactcaaggacagaaactcagaaacaggaaggaatcaaatgaaaatgatagatgatgatgtatgatcaaaatggtgataagaataaaattgtaatgaaattataaatggaaaaaggaagtttatggtaatgaagatacctggtgaaagagaaatcttgaagagtttggagacgaaaggtgatgaacaagagaggaaagagcacataaatgcagagaacactagcaaaaaaaatgcacaaatgagtagaaaatactggcaagaagtttgaaagataaagaagaaaaatctaaccgtcgaagccacgaaacgacatggttgcacagctagcaaatacgaaacgtcgtgtaggggcaaatgagtcaaatccattcaacgctgggggcaaaaaggacaaatatatccaaatgtcatgattaaggaatgtaatgaagtgatgtgcattaaatgtgcaaactgcatgctacagttacggacaaaacataatgacagtatgttacagagacgttccctattctagttatgtggagatgaatcgaccaaatgaaaccgatgagaccgtacttcaaaataccccggaaggggtaagaaaatgaattggcatgaagcagaaaccaggaagggatggccggggtgagatgaagaataccccgacatatgataagcaacagccatttataaagaacattaattgtccaagtgattgacgggatggcacaagttaatacatcccggttgcctagaagcctcgacaaccgggctggagggcaactgttactgattttgtagatggacttagtgataaggcccattgggaattcaaatagtggactgttgaccacaactgcaaataagatcgtggatttcaaagataacaaaagaaaagatcgtaggatcaagcagttagaatctcgaccatgaatatcggagagaatcttcaactgaccagaggtaatttcagtataaataaagaatatatttagaggaaaaggtacacacccattcgatcccttttctctttccattaacactgtgcacacacctcaccccactggttgagtattgcttcatgcatagtgatcgtactttttaggggtatttctcttctacgaatacctcaggaaagagcttgatccaatatcaaaattaccagcatctttgctagacatttctgttcgtaaaagacagaacaactacaagtatagattttttttcttggtaaacatcagaatgctcattagaaagatttcttagaataggaatctcataatgactctacaagttgtcatttcatggcaactgtcaagtctatctacatgctccaaaaacctgtcagttgagtgggctccacttcaatggtcttctttgggactttaaaaggatattcaagaacatcttgaagataagttgaatcattctagttagagaaactcgaacatgatctctatgtgagaaaagtgtattttatgctgcaaccctctctgttgagagtgaccaacttatgtattgaacttgtaatttttcatagatctaagatagaagtgagagattgtattttcctaagtggaaaccttttctgaggtgaaatcccaaaatacagaaaccctttttgttgttgaaagaccagtagtgactagctagcattgttgaaatccagtggtgttgttggtttaattgaagctacactgctacaaaaagggtctttcaagatgcgtgttttaagatggttctaatatacccatccttattggtagcgcggtggcaattttgtaaataaaatgccacgttcaaagacggttgccaattaactgtttttgaaacttcagtactaagacggttttcactacaaccgtctttgcacccatttatgtttttgcttttatttactcctttatgtcattctctctctctcttcaaatcatggttcaaaaaaaacacgttctcctttgaggtgaggccgctcgctctctagggtttttgattttctcttccctttcaattttcatacctagggttggggcttgggttcactatgccaagtgtgagatgaagaatggtgaggttacgaggtcgaggaacgtttacgatgggaagtcgtggataaactctccgatgacaaggaagcagagcaattgtttgttgcgactcggcctccctggtgggtctgcgatgatcacaacgagtcaacaatagtcaagggcagtggtggaaagagaggcttctgtgaaactgcttctgttgatttgaagcttaatctttcttccagtgataactctgcctcggattcaccttcatctgtgtctaccgagaaggtcaaagagaaaactaccacttctacacctcctcctccttctcgagctaacaaccctgcaaaaccacctataaagtcagttcttctcctccttatgctttcccttcatttcaattccatatgcttgatgtgccttttttcttttctcttgttatatgatctatagcatgttagatatttgatttagattttgtctgagatatagaaagggtaaattgaatagtttacttgtttatgaaataaaattagattaattagccgattttgttcaatatgtgaagcgatgatgcacagaaaattaattattagaagaacgaggaattcttgttaagagtgtgtagagattttgaggagggagaaagcaaaagaaaaagaaactgattgatttaactttctattgaaaaagataatagaaagaggaatggggaagcagaaatggtttgtcaagcttgtttgcacagtagaggaatgtactgaatccttacttctggcaaatgataagggaaattgtcaagttcaaagatgatgttattaggcaagttggcaactactatagttaaagttaaatctttctttcagtgtttgattgtcccttttccagtgaacaaagaaaactgagcctgaagccaaggacaaagaaaactgagcctgaagccaaggctggtccaaactttgaagatgcttcagatgatgcctttgatccaggaaaatctgaaatttaattgggggacactcagttaagtacagccgaattattcttgtattaataatagagatcctacttgaaaccttcaggtattaactgattaataaaaacttataaaagggctacaaatattctttaccaattttgacaagctcttctagaaacttctggacttctgtggagttcttcttcaaaccagcttccttgggttctttagccaaactctgcaaggtgacaaaatttttcaacaagtactttgtcaatcaatattggtttgactctttatttcttgtattatgaaatatacgtgtgtgtgtgtgtgttatgtgtcaatgtactttgatttcagttgatgaagcctcataagaatctagctagctaattatctcttatacatctccctctataaatgtaacctttgctttcaatatatatcaccagttatccaatattatccaattttttttttcatttaatcatggctgcaccacatgataatggtccaagaaacatggtttccatttcaaggattgtgtatcaccctttactttcactactacgaaaagcattttttacgacggtgattctacgtcggttaataagaaaccaacttagaaagacatgcagtggcatttttgtaaataaatacaaaaatgcgacgactgcaaaaccgtctttgaagtatgtcattttaagacggttttgtaaaaaccgtcttagaaggtttttcgattttttaaatatttgaagtctccgtataatctctcacctctttctattctcactcagcctctcacctgaaacaacctctagggtttccaagaagtcactagaaggaccaaggccacctctcatcaacgcctccaagaccaagctgggttccttctaccacagcatcgcggagaggaaggagaggctgctctccatgaagggaggcatcggcagtgactactcccaaattgggatcccgctgtcgaagaccaacgaggaggatcactctccgacgtaggaggcgctgctgctaccatgccgcctcggacgggatcgtcggagacggatgcgaaggagaagagtgcggtgatgcggctctgaatatcaaagcaatggcaatgctgaaggtcgtagagttggaggcgcgaaataggttcaaagcttgaggtggtttcaaagtgtagacgaggttcagaacttgaagggcgtttgatgtttgaagcgaagttctcgaagcttgaagtggttttgtgcagtttggtaggacgatttggagaagttgttgaactccaaatctatatttatttttgctctctgatttctaatttttggtttgtgatttctatactagcaaggaagtttgaaatttttggtttcagattgattttaagtgttcgtattttaattttgatgttaacgttttttatttaatttttattttcattttaatttctgggttagcttgctagttttccatttcaggttctggtatcattgaaaagaatgccttgaggcgtacaatgaaaacttgggtttgtatctgattaacatgagtagttggatttgtcatagataaagcccaatatgttttattttcttttcttttggtaagttcatgcatataattgaatgtggacttttgtgcagggttaagatgcaattcttattagaagtcgatgacagaggtatgcataatctatacaagcaacttggtagctcaggacattcatttgatgcaaaacgttggattgcaaccttggatcgacaattgaaaggcttgctagtgccatggcaacaaacattcccacagtagatattagaggtatctatatcaatgaattcacactcatatcaatgaattcacactcatactttatattttgtattcttgactagaatgtatgatgtaatgaattggttgtggttttgtagcttgctcttgcttttctttcttttttcattatggttcatgtttgtgttatgttttgctgtttttgcatgatgatatgggtatctgataaaaccataagtgcactctggtgaccttgctgcacatggagtctgatcttaacaagctgcttgatttatttttttaattttaatgactgtcatttatggcaaagatgcatttaaaagagataaaaattaaatagagagaggaataaacgaggtaggaatgggtgggggtgatgaagaggaagatgagcagaagagtggtatatacttgtggtatggagttgtggtcctgctcctgcatagccagattgggacttagagatcgaagctagctagctagctagtgtgagtgtgaccttattcggacgtcgtttgggtttgcaattttaataattttttgccatgtagcgcgggaggaacgtgtttgtcacgtcgtacaagcaagctaggctgcttattaagccacattgagatagcgcagcagtactactacatggttgtgattgactgattgttgtgaggattgagattcctgcaccttgtgtttgtgctcttgctactgctgcattctttccgttatgctataataatcattgcactgctaatcaaagactatatatgattcggatagagatacatatatcagaataatagtattttatatccttggccgggaggatcttgattcttagaaactaactttttaatttcgaaggacctttacctttacttttaccctcccttttaattacccctagtaacataacatgtgcacatgtatatattaatgtaaggttttcttctcctcccatataaagaaaggaaacacacacacattcaactcatttaattagaagccaatgtaaataaagcatgttgaagtttcagtgggataatatatggtatgtgtgtggcactttttatttaacattttgttgggtcataagttgtgcccgtgcgtgtctttccctatcccataatatttatttttgaatagtgaaatcattgttactaaccaggcatgggtaaggaaagaaaacaagaaacccatttcaaattaatgcaagatataataagttcctaattatcaagtaggtcagcaccagtggcacaaatgatacttttgggattggtatgcagcaaccaaataagatggtgagggctcttgctatgaatttgctagattaattatctaattttaatctattaggtggattaacgttaatcaattattaggaactattctttaattattaattatatattactgttatttatggtcaaaataacaattattatgactctaaattaattgatgaatactattacattggcattcttctgatgggttgggctattaattgatgtccaggttgaggttgctgatctaatacgatcgttatttattgaggaggagaatccaagagttacctatctttgtgagtatttttcatttaactttgattattaatatacttttaatatacttttacgttataaattcatgtttgggacaacttataataagtcatttcagttgttttcttagaaaaaaaaaatggtttcaaaataaactggatgtttgggatccagcttaaatttagaaaaaaaacatttttcttttatgaagctagagatttatagtttatcattatttttcaacaactctttttttcttcctgctgttttatacagtatagtacatagctgtatcattatgaagctgataattattattatctcatattaaggaaagatgctctgaagcattacatagctgttttatacagctgcagttaagttgcacatttttacccatcactgttgcagttttttctagtgggtgcctcctttttgttgggctagatgtggtccaaacttgaaatcccaaattaaagctaagtctatgttctttattttgaatcaccttttttttttatccgtgtcaatgttagttattaggtgttaattttctattagtgaaaaattcaaaatcatcaagtccacaacttctctattcctttctttttcctttatcattaagcaaaacttataattccttctatttgtatcaccataatcatcaagatagattatttattgaattttatagtaaatatgtagtggatattatatgcctaagagtaaataataaatttaagtctgaattgtatctttttaattatatatagtttcaatttttatgttaaaaagtaacataaaaattgtagttcaatttaagtctgacttgtcatatatgtagaaagtggaatcgtgccaatatgctgtaaagaaaagtagtgtcttggtttagtgcatttagatttagattgtagttcattttttaagcctatataataattgatcttatttatagttatataataatattatataagtataaatgagcaaaaccttctgtttctttgatttcaccaccttagctagcatagttatacaattttctgattgatggatgctgttattcttgtttattttaatgcttacactactagacaagtagtttttcttattgtggtaccaattggtttgttttgcttctgcatttgttgatcattgatgttagagtgtagcaaataattatatagctttttcacatgcagctgtgcacaaggttcaaatggggcagtccactctgtcccacgaacaagttcaattgtggtaactcactgttctcactttcagcaaatacaaatagtttccttgattattgttgtgtcattaaggattcgaagttaactcttattttctttatggatgcgggttcagttttctatgatatcactaaaattttgcttggtgtgaaactcttgtcaagaagattacttgatgcttagagattagttaaataacttgataaaagaatgcttttgtaatttaggcctctacagtaatcttttgagtaagtctttattcttatatgataatattgagtatatctctccgttctactatttttcactggagacaaaatttctaacattttgcttttatgaaaccatatcaaagccattccactcatttttaaaatgctttattatttgctagtaatcttacttatagactaggctcctcttgttgatagctatggctactttttagtcttacctttcatgataatatcaccactttgctagtcaggccacacatttctttgccatgagacctcaataccagtacatacaattttggatgctcttgagtatattagcagctattgctgcatatgagacacaatcgtctaagccaatatgaaaggagtgaaaattttgctctatacaaaaaaatagttgtaatggaacataatgctattgaataatctcttaaatatgaatttagtttatgtaaatttgtgctttttcatggtatctatatgtttgtttttgttgatttgtagtctctatatttttttacttttctaatgaaaaaaatgtaataaatttttaaaagtttaaaattcaaaaacatataaatttacaagactaaaatgaataaaaaaatttacaggatcaaaattaaaaataaaataaacttatgaaactaaatttatatcagacttacttgacacaatgcttcttgttctggcagccacatgcacaagagggacaaggggtaatggtttcattgtaaaaggatgacgaatatacacaacaacttgggttctttcttgccagaaattgtgagtatctgcaggtaacattccatgtcactgcataagagaaaacaaacgagactttaagaattgttgaagatgaagttaatgagcaaaaattgaaaatttcaatatttgatagttttttatttaatatttgatttagtttcactgttgcattttaccgctatgaaataaatttcaatgctagctaacaatattgtgacattctatttgatctttctttacatccatgacaactatgtctagctatttgttggaattttgtgtgacttagtgcgtgtttagattcaagttgagtcttttagaacctctttgaaatatcaaataatgtgattttaggtaaacattcacatgtttagttttgcattaaataattgattttgagttgaaacaacttcaaataacttttgtatttggataaaaaaaaattctgaattttcctaccaagttgcttttagaataaaaacattgaaacataagtcacataatttcaaaatcaaattttgcatatgaacacctaaacacacatgttgttttcccctgttctgctcattttctcattttactttgaaactaaatctaaatttgtcttttgtatctttctgatttcagttatggtaaaaaaggatagctgcaattgtttttctttgaagttttgaattgtaatttttttctttatttttgtttgttgaaggttgaccttgatcttggaaactatgagcgtttcttgtatatattggcatgatttatttaaaatatattatgctatttttcgtttgagtcaaccgtatataattatctcaagttctaaattgtttttctgttgttattgtgcatttactgttgatccttatattttttttttttatatagacacattcaaagtcggttatttgaaacaaccgtcttaaaattgtcaatatagtcattcaaagtcggttatttcaaataaccgccttagatccttcatttttttattttttttaaataaatggattcaaagtcggttatttcaaataaccgtcttagatccttcattttttttttaaataaatggattcaaagtcggttatttaaaacaaccgtcttaaaattgtcagtctagtcattcaaagttagttattccaaataaccgactttgtatctaagctttctaagtcggttttttaaaaaaccgactttgtatagaagctttctaagtcggttttttaaaataaccgactttgtatttaatatttcaaagtcgggttttaaaataaacgtctttgtatcctagctttcaaagtcggttttttcaaataaccgactttgtatctaagcttctaagtcgattttttaaaataaccgacttagattgtacgaatttttttaaaaaaaatataaaaaaaaaaaattcaaagtcggtccttagaaaaccgacgttgcagccttcccttttttacgacgtcagtgtgtaaggtcggttccagaaccgactttgtaggggtcaaataaccgactttaaaaactgtttttgtagtagtgtttcttatgtggatctctttactcgtacaaatattttccctttgtttttgtcaatggtttccaaggaaaggtgatacattgattttatacattatatggttgtcaattttttcacagaattatagaaccacttgcttcaaggtgtgcaaaattcaggttcaaaccattatcagaagaaatcatgattagccggatattatacatctcccaagaagaagaactctgtcttgatactgaggctgctgttgataaatttgactcttatgtaagttgctttgattttgttcaatatatatttactgcgtgtgtgattattaatatatatatttagaatgaaatcatgtctttatgattgagctgtatgaattttcaattgtttgtacggcaatgccaatagatccaaatggatatatacagtcatgaacagtggtacttctaggcatggcttaatttgtattggtaatcttggtatattgtttgttttcttttttttgccataaagataagaacatcataaagtttagaagtcttcaattaatagtctcacaactaggtgtgatcataggtctcagcatgaatacgatgaatttgtgctgatttaaacaacagaaatgagtaattgaatttgtaccatatatatgtttaaattcttgtacaataaaaaaatagaaaaagttgtgatatgatgtttgatgtaacgaagagatatagaaaatatagtaatattatagagaaatgggaaattgaatttatactatatagctgtataatttttgtacaataagaaaataaaaaataaaaaaagttgtgatatgatgtttgatgtaatgaaaatatattagaagaaaataatattataaaaaatgttgtgtgaatgatataacttgaacaactatgataaaacatgctgtcacatttactaagagataatagagtataataaaacatgctgtcacatttaagaataatgactttaatttataatacaggaggtaatagtttcttatgtatctcaagtttttaaaaaataactgatttacaaaattacgaagtatatatttgactaaattgtcacccattaaaatacttaaaatttaattattctattaatgccttttattttgtttaatttaatgaaaaactatacctatgagcacgagttattcttgtttttagctttgccaaagatgaaacagaataagacttatatttgaaaatgacaaaatattcaaaaatgaacgagaagtgtaattttaaattgtaattaaattgatgaatttgctaccagttgacatttatttagcatttgtgagcaacataaaattcaaattccaacttaattctatgactgaatggttcactacttaattctagttatatatttctcatcattgttcaatttcagtttatggtgtagtttaatgattagtcatatttatattaataatctaaaacacttctttgtgcttaagcatgcacagtttatggtgtttgcctgaggatttggggcgtttccaggtgatacgtatcttgacttgattgtggtcgatataactggataggaataatgcatcgcatgtaaggaaaaaattatttatagagttatgatgcttgcctttgttttgtattttaaattttaaatatcttaatactaaggttttattttacttgacttgttcgttgtgtccgttctaccaaatttctgaatttaatttactatctcttctttagttcacttaaaagatcaaatgatagtacccggattatcatcacagctattatgggaattgcctttggattttttgttggtatttgaatttcttctgtgcatttgactaaggtaatatttacaacggtcactcttttcaatgttttgtcatgcgttttatctattaatgagttgaagtagagattgtatccatgagatttcagtagctaaatcagctagtgccttgtactctgattttgcccttaattaagatacaagcctctgcttcctcaaagattaggccaaaagtgtttctttaagaaatacaaagtaacctgtcatacatttcctatcttcaatgctagtagctcaatgagcatctgaaaatcccaatttgtcaacatcttatataatgtgtaaacaatgatcaataattccctaaagatacctcaattcttttcacaccttgccaatgttcagtggtactggacttggagcagtaataaactaagtcaacttattaattgaataagagatgtcaggtctagtgttagttagatattggagacactcaatgccttgtctaaacatagttggattcttcagttgttcacctgtagttgtgaagtttctccctataaccataggagtttaaccaagtactttgttggcaaggaaagaggattccttttggtagaactgggagcattgaagcttaaaggagatcttgagatcaagcatttgggaaaagtgaaaagtgtaaaggatgccagagatgcaaatatgtcaagtaagcaactgaataagttgacattgtcatgggacaaatatgatgaagagtgggaattacaagaaaatgttgaggaaattcttgaggtgcttcaccctgatacccaacaacttcagagtttgtgggtgggaggatataaaggtgtctacttccacaatgggtatttagtccttctctcatgtatttgaggattgaaagatgcagagagataaatggtttgcatgaagctttacaacatatgactgtcctgcactcattatcactatattaccttcgaaacctagaatccttgcctgaatgtcttggaaaccttcctttgcttcgggaattggctattggtttctgttccaagttgaggagtcttccaacgagcctaagccttggcagtctgaaaatgttgaggatttggggctgccctgagttagagaagcaatgtgagaaggaaacaggggagggcttgtcaaaaatagctcattttcctgaaattagagtgaacaattatcttataaaaaggttaaaaaatatcctctttttacctcattatttttttagtttgagttcaaaatttttaaggtttacaaagttttactcatcctttaaaatgtttctatttaggcatgtcatactctaataatatattttttgcaaactgtatcaatgtatctattcagactagtttgagttgtaaaatttcaaagagtaaaatttgttattttcacaaaattttaggatcttacacatacaaacaaagtcaaataaatgttaggatttattttgtgttttatttcctatatattattggatttctttcttttttgtcacatccttaattctaacttctaagaaaaatttaaagtgctccagtaatcaaagcccaataatcaccctatatgtttcaattgagaattcaaaaatattttttgatctaaaaattgaatttcttacacatcttttgtacttcaattaagaaaaacaaaccatttcaattggcatttttctacttactagcatttcatttagcatttttctacttagtggtgtttgaagtgcccggtcagtagattttagattttcatcttttttttttatactgcacaactgaaaatatatttttccttatgatcagtattctcgaacttggagagacgtaatagttagattattggcgcaggccctgtttgaagatctctgtgtgttctccttatagttaagttcacagccatgtctagttgaaggtttgacaaacaggttgctacaatcttcatatatttgtattgtttgctccttagtttattttatggtccttttatgaatgtattaaaagtggatttgcatgatttacttctttatttatcttatgtcatcacgtgtctttttatcaatatatttataagtgttgtatatatgtcaatatttcaaaaggtaaaagtttgacattgtttggtgggctagtgttctcaaaatttgcccctcttatgcacccaatagtgaaccttgtggagttttttttatattaattattttaaaataactcttaatttcagactttattaaacttatctgaaaactaaatattttgactaggttagagacttctctaagctaaattaaagcactctctaaacatagtttgcattttcaaccctcttgctactgtttctaattgttacgtggtcaattttgtttgtgaactaaaggcggttatgatatgggagagaaagctgcaagggcctatgatctcgcggctcttaagtactggggaccttcaacgcatattaacttttcggtatatttcatgtcatgtagcattttttttctttccttgattcgaatctcgtgtgctcgaacatggaagatggcaagcgaggataggcagagttgctgggaacaaagacctttaccttgggacattcagtaagtcctaaatgactatcaattcctaaatacacagggtcttagcatttgtattagaaaccaagaagactattttgtgtatttttacctctctagcttgtctgaaaaagtagtatcttcatatggcatttttttcatttctgcttcaatctttattttcccaagcactagtgactagtaatgcttctataaggctgaccatacctttactttgaatgcaacatagcacctttttttaaggctgttactcacgctgataaaactatgatagagatggataaaggatatcttagacaagatagttcaaggaaagttcaattttggagataaaggaggctatcttgacaagaaaagaatatggtttaagtaaagttcaaatttttgaaatcccttttttgagtgttacctcttggttaccctcaccagcggttcaaatgaggccatctcctgctatctctgtgtcacttgccagtttttgctgcttggactgatacttaaaacaagatagcgtgtgggttggagatgatgtatcagcagcataagcaggacattcaatcaacaaacagtgtgaagcaggacattctacaaccaggttgcatgttctttgaattcctcttattgttatatacattgataatgggcctgctgtctttacttggtctggaaactgtacaagtgcagaaaatcagaaactgaatggttattcaagaacattcacttggtctggatttcaagaacattttaccacacaaatgattaattgaatcaatgagtggttattcattaaccactcgttgaaaatcactgaccagttgcatggttcattatttcaaaattggaattactttcaccagaactttattgtaatgttccataattgacagggtacactaacctttcaagtttaaaatcaaaatcagcaggggtgttggaatatacctgtatgccatgcaccccaagtcccttagctatcttcctggtcacctctcattctcaacctattcttccctcgtataatcatattcaaccttgtcccatgattccagtattattgtctcctatcctcagctaccacgtgtccattatgttagaatttctccttctgttaatagctcctatgcatttacggcattcataatgttgtgcttcaggtgaataatgagaagagcgtctggtaaatgtgctatggatactttattcgataccttagcttatactagaagcatatttatgaaatctttagggttaatttagtccagtgcgctatgctgcttatgaagttaaattatttggattcatatctgctgcacaacattaatctgaagcaatattttcaggtgacagaggtatacaacttctcctaggatgatttgatgacagaagatattttcatcttggattgtcactcggaaatctttctctgggttggtcagctggttgaatccaagagtagaatgcaggctctaacaattggtcaggtataattggaagccatgaacatgctagtataatttagtggctactgttttgaagattttgttatgtattgtcagttattttaatatttatttttaagtcctataacatccctgcacattagaaaatcataaaaatcataagacttttgtttaagcattctcttgtcttttacatcatatgcatttatcaagttaagagtttctgaagtcatgtgttgatttatggacttcttttgaattgaacagaaatttcttgagcatgattttcttctagaaaagttatctcacttagctctagtatatgttgtcatggaagggagtgagccacctttgttcacatgcttctttaaatgggattatgctaaatttccagtaagttgtcaatgtaatggtattgtgatatgacttctggttttaaaatcctgactattggcaattccttttttactttgcagatgctgggaaactcatttcaaaggaagctgacaattgtgaaaagtggaggtgctccagttttggatgtaagacatttattcccctcccatcttataatctatagaaatctcagagagagagagagacataaaatatcactaaacagaattgcggtgtgagagagatattattcaacccaaacatatttacaccaatggtagtcaaagcatgttgaggtaaaattgagggcatagtaacacttaagttaattgcttcacccatcacaagccatgacttacacttgtcatcatgtttctgctcattcttcatggattgctgggccatatatagaaatcaaggttaaatttaattgtcattggaacctagtagtttttctatctaatggaaacactcacatttgcaatttctcttatatagacaaaacaacaaatcgatggatttatttgaaaaagatgctagtggtttacatagttggagagagaggaacatcacctctgtgaagaatatgctcaatttttgtgcactggaactacaacaatttgggttagtttcttcacttttaccacttgaattatgtagtttacttgtatttattgtattgtatagcttggatgtatttttattattatataaagcatattacgaattgaaaaaaaatcaaaaataaaaaataggaacaaaatgaataataaaaaaaaaacaaacaaagacggttgtgtctttaaccgtcttagaatgtacacctactaacccagtcgtatatgctaaccgtcttagaaagaaattaaaaaaaaaaaattctacaaattctaagatggttatccacaaaattgtcttagaatttgaaaacatactaaaacggttacctcaggaaccgtcttaaaaggtactttaataaagctataatagattctaagacggttattccctgtaaccgtcttaaaaagagtagatactaagacggttattccctgtaaccattttaagacggttgcagcagataaccgtcttagaatctgttttttttttcttgtaaaagtacattccaagacggtcatggtctatacccgtcttcgaattgaaactttctaagacggtggtacggataaccgttttagaaagtacttaaaaaaacaaaaacaaaaaaaaagaatttaagacggtttgacgaccgtcttcgtaaatcctactttgtatgtcacgtgatactaggacgatcctacaaccgtctttgaagaggcattttaaccgtcttaaaatcctatttttgtagtagtgctacgttggaagtccagcgggagtactagcaagttgttgaaatccaatggttattggtccagcaatggttgattgtgttactaaaatctcatctttaagggtgaggtttggatgtagcccaaagtttaggtgaattggtataaaaatcattgtacactctcctcttctctctctttgaattgattatggtaattgatttgttaattggttttgtaaatcctcaatacagaaaaggttttcacaagtacacataaaactgaacttattttgtcaaagtattttcaaacaatgtttttgaaacaagagttatgaattgtgatagaacttttttttcagaacttcttgtattttcgttcagagcttagaacagttcttcattctaaattgattcattcttagcttatatcataaacttgttatctttcaaaaggattttaaaagttagcaaaaccccaattcaacccctcttatggtgatatttttgtcacttcaatatgttccatttcttccttttcactttaaatatttaataagtaagcttgtaagcagaaatgcgttatgctttcaaaaaggattttaaaagttagcaaaaccccaattcaacccctctttttgtgatatttttgtcacttcaatatgttccatttcttccttttcgttttaaatatttaataagtaagcttgtaagcggaactgcgttttgctttcctttcgaaaaggtcaacaagttgtttcatttattatgcgatattaactttagaaagcaactaataaaatctttcgttacgaaatttcactaaattttcagttcacgttttcccaacttatatgactgtgaaatttcaattgattaatgcactctataaaataaagaaataaaatagttaagttataattatagtcaaagaagctacgatgttataacatgcacttttttaaaaaaaaaattaatcaaaactattttataatagaacattaaaatataaacccaaaatttatcatgcacattgttgtgactttaattgttttacatgtaagaaattcatttgtttgaatattacatnnnnnnnnnnnnnnnnnnnnnnnnnnnnnnnnnnnnnnnnnnnnnnnnnnnnnnnnnnnnnnnnnnnnnnnnnnnnnnnnnnnnnnnnnnnnnnnnnnnnnnnnnnnnnnnnnnnnnnnnnnnnnnnnnnnnnnnnnnnnnnnnnnngttataacatgcacttttttaaaaaaaaaaaaattaatcaaaacaattttataatagaacattaaaatataaacctaaaatttatcgtgcacattgttgtgactttaattgttttacatgtaagaaattcatttgtttgaatattacataaataaatatagaatttatttgttttttttatctgttagagtctaatacaaaaggatcggccttgaatatttggtgccctgggcgaattgagaaaattataccctagtaatcatttgaattttatccttcttacaattttgtggcaacatttttaataatttattcataaccaaaaatttaaataaagatattcaacagaaatcaaaacacaagtttatttaatttaccttgtgacatagtttcaaataggatgttaacaatttcaaattcgatagattagcttcttttttagtatatgcaatagtagtaacaaactaacaatagttaacatcattttataagttgtacatgcaataagaaaacaattaattaaatgtttcaaataactccatcatatagttggtgtaaatttaggaacaaatgatgcacaaagagcatgtatataacaactaataataatcataagagagttagagatatgtcctgaagaggagatggaactcatccttaataactcgattggatcgcaaacaccaaatgagggacatattactctctgtgtggtggttaggatttccaaacagtgttgtgttatggtaaaattgtctaatgctacaacaaaattttataaccacacaagagcatgcagtgacccctcgtttaaacattaagtgaggctcaacctatcattggagcactcacataataagcccaaaattaatattcatcaattaatataccgtatatatattttatttccataattgatattaataatcatatatttaatctaataattaaacaatgttaattcacaaaatttcaacaaaattttgaatttgattcattgctgaagtttgaatcataaccatcttaattttttattcatgaaatttatttacataattatgttaacgctaattatagcaatgataggaaataatatatcatactcttctttcttacattcaacattttacctaaattatcgatttttttctcaaaattgtgaataaattttgttgataaatgaaaagatctgtattaattgactaattactgatattgttttcctaaaaagaatctacagaaaattattttatttttcataattttttatataaacatttttatgtaattttaaaattataaaaaaaaatatttatataaactatatagagtcttggacccctcagggccaccactttggctattactttaaggatattgattaataaaaattaaatatgctttattaaatatcttttgttacataaaaacagatgtttgttattttttatattatcgatattatagatattagcgaacacacgggcactacatgcttgctctttttataaaaaatgtgactttgattgtttaacagatttttactttttaaaagtttaatataatttatacgaatgttaaccaatgtctattaagaaattaaaagaaaaaatatttttattagaatgcttaaaattatgttattcctaatttttttaaagttttagttccttaatttagactagtcaatcatacccatagtttatttaacatgcatgtgagaatatttaagataagatggtgagttgttttagtgggtgatgattaaaaaaacattgatatgatgcagagatgtgaatgtgatacgtacacaaaattttctttttcttccgtaagatttaattttattttttttagataaaatggagagatttaaaaggagaggataaagactaaaaacatcgcaggatccgaaaacaacggacctattgtgtgagttctgaaacatttttttctgtctctttattttggaagtcctttttgttttgttttcgtattgttgttgattccttctgattctgagacagaagaaggaagaaccaacaagaggaatccaagttccttcctaggaaccgcgattcctcgtccattcatatgcttcctcaactttctcctctcttctctctctaactcaggttgtcctttttttctctctctctctctctcatgcttttattcttcatctttttcatgcataagaaaaaatgagcatgacccttttctctatattatgtaatattattcttccttattcaatgtgtttgtgtttcaaccccgtgtcttcaatttcttcatgcatgcatgcgtttcatcactccacatgtcttcccaattgaatgtttctattattttcttgttatatttcttacattttttttatcagatgaatagctcttaatgcttgttttttgtcatcgtttaaacattgcggcatgttttgtaggcttttttgtattcatccaatggatcaacttccacgttgtctttcttagtttgagtgcatatatatatatatattgtctcttttctcactattgcaaaccaaatacaaaattaaagaagaaagtgcttttactgtttttacaaatatttttctgttttctaaaattgctttnnnnnnnnnnnnnnnnnnnnnnnnnnnnnnnnnnnnnnnnnnnnnnnnnnnnnnnnnnnnnnnnnnnnnnnnnnnnnnnnnnnnnnntctttttgtcatcgtttaaacactgcggcatgttttgtaggcttttttgtattcatccaatgaatcaacttccacgttgtctttcttagtttgagtgcatatatatatatatatatattgtctcttttctcactattgcaaaccaaatacagaattaaagaagaaagtgcttttactgtttttacaaatatttttctgttttctaaaattgctttgtttttgtctccaaagcatacatcagaacccttgagacatgtcttttttctaagagtttgttaaagtacttaagaaaacagatgagaaaatattttccgaatgtttctgttttttggttgttaaaacccttgttttttaatgcaaattgcaaaacttaataattatagatgaaaaattgattgctagtggtatgaagttgttttaggaggaaaaaaatgaacaaaaatagtgagaagggaatcaaacagccctaagtttctcttttttttttggatgaagggttcccttttttggggaggcatataaacacaactttttacatttttttcatcagtaataccattatgcacaatgaagtttgctctaattgttgctgctgcttatattctggaaatttttcttctttccttcaagcacttcttaatggatagtatattttcaactctatattccattcttcaggtctatccaaagaaggtgatcactgattcactatcgaattggctccatgtgaaatataatagtagggacattatatctagctagcactcttggtccaaggacatagagtgaatgttccactgtggaattaacttattttgagaatgctgagttttattcattatctggaagagatgttcttattaaaattgatcttatttttccttgtaatgtatatgcttatctatatctatcagcaaatggtttaaaaatggaaaaattattcatttgatccctaaaattccacaaactttaccttttagtccctacatttaacaaccatcccttttagtccctatacaagtgattaagcactttcggatcccttatgatccctgccgtaacacaaactttactttttaatccttgccattttgtaatagcagggaccaaaaaatattaaaagtgaagtgcttgtacagggactaaaagggtataaggagtaaaaggtaaagtttgtgctactgtagaaccaaatgagtaattttttcctttaaaagcaattgatttttcggaaatattgttttttttttttctctctctctctttcagtatacatactcacattcaggaaaaggattctgaatatagtcaatagaatgtggcttggactctgggttgtctttggactttggtttattcttctgtgtttccttttccatatgtaaatttggttgtttgtgtggcaggcagattctttcatctcaaggagattatagcacagtgtctgaatcctttttagtgagttggcatcaatcatgttgggtggatttgtaaaaaaattcgcttccaaaattggaggctgcacctcaaagccgaacaggaagagtaatgttcataaaagagaacacaaaaaattcagaaaacatgcttcacttggtgacataacaaagaaaaggcatagcaatgcttcagccaccggcaggaaatctgatgtttctaacatgaagttgcatcttgctcaactccaataccacagccatagtaaaaaagatgcaagtggtatcttttctatccctcccagtagtagtagtgtactagtagtagtagtaatagtagcagtagtatagtagtattgaagatgcttcttgttttttgtgctatttatgataatatttcttgtttttggtgtttgaagatgcttcttatggcattattggatttattggatttcatgtggttgacaattgacatagatacctttgataaacatgatgagcaattatattttgcaggaaaaacccatgaggatgcctggtttgactcagttagcattatagaatctgaatcagatgaagattttattagtgtacatggaggtgatgcatttatatcatattccttaccttgtgaatatttttttttctattgtttctttgttatgctcatgaaatttctctgtttcttcctttgtggccaacagatggttttccctttgtgagtaataatgctttgggaagtgttccaaacactcagttactccaatatgaaaatgcatcatgctttgtagattcaaggaataaatatgatgggttatgtgatagctacttcaaagcaggtaattataagagtggggaggttaattaattttaatgacatgaaaaattctccaagtgtgcaaatcttccttgaatatttcactatttagatctttactgtttaaaaatattcaaatgtaaaaataattatttcatcagaaagaaaacagcaacaggcggtttttactttttatgctttcaatgaaaaggaaatccatttatggaaatgagaaaaatgaattatacaaatacaaaaatgaattaaaatttttcgttttgttttctgttgaacttttggtggttggttggggtatttcactatttagaacttcattgtttaaaaatcatcaaaactaaaataattcttttgtctgaaagcttggagctttccttgtccaaccgtgataacgatatctgtatttaatacaagtcaataattcttcattcttagtcacttttctattgtattatttggtctggtaaaaaatgtatgaagcacatatctcttttattcaggtgtcaggaaatgttttcgacaccaacacatctggatatttgtttgacacttttctgacatttcttattaattgtctaattcaaaaattattttttattggcttgaatacttgttgtcacctttacgcaataatacacttgaaaaaatataaaatactggtttaaaaagatgaatatagcatcatttagatattttatatcctagagtcttatattttagacattaacagtgtcaaaatattcatactcgtgttgtgtccgatgttcgtgtaaaactctgtgcttcatagactaacacattaaaatttcatgatattgtaccattttgtatatttagaccaagaggaattttaacaacaaatgagtgaatggataggtgcacctgagagatttctttgtcgtcctagagctggccttcagattctaaatacaactcaagagaagccatgccccaggtcctggtctgcagtttcaccttcagttttcaacctccgcggagaaaaatatttcaggcatgtcagcatattgtatctgtcaaatcttatgttgttatgttatgcaatctatatccattaattatttgatttccttttattgcatctgaaagcttgatattattaacttaaggttaactaaatatttagttctaaactttttttgaaatttgatttttagtctctaaacttttgtttgattggtcaaggttaattaacttttgttcaggaaggtttttattcttctaaatttttgtttgattggtcaagttctctaattttttggaaatttcagtttttagtccttgaataaaagtttgagttcattatttttatatacttaatgagatttcaaggactaaaagttgaatttttcaaaagttttggaactaaaaaccttaatgaaaaaaaaattgaaggacattgatcaatcaaacaaaaatttagggactaaaaaccttaatgaaaaaagttaagggaccttgacccatcaaataaaattttagggattacaaatcaatttaaaaaaaaaaaaaaaaaataggaactaaaaattttagttaactctattaacttattatattatatatcataattatgaactaactatgcagagataagcaaaagtgtcctgctccagattttagcccttatataccaataggtgttgatttatttgcgtgtccccggaaggtaaatcacattgctcagcatctagaacttccttctgttaaagaacatgagaaagtaccttccctccttattgttaatatacaggttcactctccatctcaaaccacatattttctccttctgaatttgacaaattcacctataacaatgttttattgatgttgatttttctgtttgaacaaaatacaagaatgctgcataggttaattgtgttccttttgttccagttgccaacatatgctgctagcatgttccctggtgatgctgatggggaaggcatgagccttgtattatactttaaattgtctgagaattttgacaaagatatctctcctcgctttcaggagagcatcaaggtatctcttctaatcaataattgcatgttttgaatctcaaatctgtcagtttacaacaattttcccccaaaaggtatttgtaagtaaaaataaggcttaaatatattttttctacaatttagctttttttatttgaatccctgcaaaaaaaaaaatttgttttagtccttgtaaaatatgtttgttttattttttgtccttaaaacttttttttattatttaaagcactgtcaatagtgttttaggaccaaaaattaaacaaacatatttttgtaaggactaaaataaaaaatataatggatgaaaatgaaaaataaaacgttaaattgcatggacgaaaagtatatttaagaaaaaaaaatatctacctgttagacagttttcttcttttgcttcatagaggctatagaacttcaatatttgattggattatatcgcattaaatagtcgttaccttaccaaggaatttaggagaaccatcatgctagcactcaagaagaaaacatacgaaattttttcactctgatttaattttacaatcctccatcaaatgatccccaatgtagagtgtattagactttgtttccagtgattgattaccctcatgtattatccagatatgaatttgctagaaattcttggcttcacatttgaactagattcgtgatgtaatattgtaatatgttcattctttttctagtgctactacttagtatagattttctatatagttttgctgcagtggctggctacatttttagtaattttaataacagtattgttttcacagagattagtagatgatgagatggaaatagttaacgggtttacaaaggaaagcttggttccctttagtgaaaggctaaaaattttggcaggggtggttaatccagaggaccttcagctaaaatccgcagaaagaaagcttctaagtgcctacaatggcaagccagtgctttcacgccctcaacacaaattctttaaggtatatacaaatgtatctatctcttggtttacaatatctgtcttcaaatatcaatctttagcatcagtgatctacacttgtttcagggtgcactccttcacttttaaaaattacttataaatatctttaatgtgtatatttggctctccctaattttatatatttccgtgctcctgattttctactctttatgctaacaattattaattttaattttaaaataaattaaacctcctaacttaggctcctatatctaacactgtttagcatattcattctattggagttgagatcatcgagtatgggaaattttatatacaactttagtcattattttgaaatgttttgatctacttacataaataatataaaccccattatatctattttagagatgttcacaagtcagagctctatgtagttacattaactacgttgttgatagattaacttgcaaatttggtttattgctctcctttttggtaaattacagttgtagtaatccaacttcctaggctctccatatgattttgggcctttcagaaagggttgtgatttttctgttttcattgtttctatgaatggcataatctatgttgaattctttaacaaagtatttttacatagggaagaatgatcttaaccgatgttctaatatatattaatattatctagctgtttcctcaatttagttaccacacaaaataaaactcactttaccatacaataaatcttcatatccttttgtatctgctgttaatttatatatattcattgcaggggcctaactattttgaaattgacttggacatacatcgctttagctatatatcaaggaaagcacttgattcactacgagagcgtacaaagaatataatacttaatatgggcctaactatccaggtatagtatatagtcttgaaacatttaatttgaacactttttttaagaaaattttgaatacattttggtatcaaattaatcaaactactctcaagaggtattccactttcaaatcttttcagaagcccttttcaggtcatgatttagttcatgtttagattaaagtttgcaaacttaattttaaattaaacttaagtttgcaaacttaattttaaattaaatttaagtttacatactgagttagcaaaagcaatccaagtattgttttttacaaactgagttttcagataaaattttaatatgcaaacatacttttaaggataaccaaacatgtctccaaacctagttttactcttcaaattgagtttggagcaccccaaatgaaaaatcaagcatatccttaattatcatagttcttccttctttagcaagtatgatgtttttcccagctgattgattgctatatgaaaaaggttccatattttatacctttttgttttctatgcttgcacaggcacagaagcaagaggaactgccagagcaagtcttatgctgcttacggctgaacaaaattgattttgctaacaatggtcaaattcctaccattgtagcacttgatgataattaattcatgtaggcatgaggtggcaaattggggtaatacccagatgatcatctatggggggaagacataagacaagattttgtaaatctatttacttaacaatggaggaaaaggaagagaagtaaaatttaagcaattagtgctttctctcatgcaagatttttttctttcttttagtgtatggtttggatttactattgtcactcatttgacatcccctagataatagattctaaggtcgtgtttctagaggtggtcaaatgggaacttacatgtaaatttgagattctccaaggaggcgtcattgagtagaatgcatcactttcttgatagtttgtgtgtcataacgaaatcgttttctttttatgttctttactctttagcatgatcacacattgacaccgctgatgtcagatgagaaatggaaaaacaaatagaaaaaaaaaaaaagataaagccttttccatggttgtgtctcatattttaaagaaatgttttatatttagacacccacaaatttcaaacacctacttgatatttttgttatttctttttctttatttttttatcaaaacataccaattatcttacatatatttctctctcttctctcttttactctcacaatgtgtcacatagcacatcggtattctatttaaatgataagtgaacttaataaatgataaatttgggcattccgaatattgaaaacaatgacatattattcaatccactattagtagttaggataaataataaaattatgattgaaacaaacgtttggcatcaccataataatcaaaatatatctcgacatgattgttttcttgtcttagttaatgtctctagagcttgtttaagctgaccattgtagtactcaatgagatatctctactgctccttctattaatgcctggcaaataaaaagaagcacaaatgaagttgaatcatatttctaatcaaaacctgaagccaatattttagtacataaattcgacatgacatacattggtgacattgataatttcttcaataattaggggaactatttgatgaagttctgcaatgttttttatttgacaagataagcgagttaatatcattttcactcatctctcacaatagaaacaatgagtttttaaagtaatttttgcactctgtcaaataataagggaataaagattgccagtcatactgagaaactatcatatgtatgtaacagaaacattactaaaggagtttttgtaaaaccttctttatttttgcataggaagggtttgagcttcttaaaccaatcaagttgaacactcaatgaattagccgttgatggtggaatgggtcttttttttgtgtgaaatagtccatttcaagtgcagttgcatcaccaattgcaaagtttactccatgtccaatgtttgggatttggtgagatttaaataggttgacaatattagcaatccatatacctcagctacaactaaaacaaccatatatacatatatgttagtattttctaatcaccaatatattatttatgttaccttcatttaaaggaaattttatttaagctaactacaaaaataggggcatatatatggctataaaatctacgatatatcaatcgtccatttgacatatctccagacggatgtttagagtatgttgagtcataaggggtgttgtcatccctagatgggtgataagtagcagcatttccagtgttatttatagagttgccaaaattgaaaatagcttcctatgggagatgattggcatttgaaataatatttccaaaaaaactacaggtaaaggtgacgctaaagataacgaagatcttcatgatttgcacttgaatatcaattggaattgagcattatatattgtcataaaaaccaccccttcatctcactatgtatttgttgctttaattttgacatgttttgtttcttaaaaaattaatttgcaagttgtattcttgtatatttaactaacacatacatccttgaatataggttttttactccttagcgttgttttgtgttattatatattttggtctttctatgacaatttgatgcttccaattgactctctgtagatgtattcaaacactataattaaaggatgcaacaatttccgtgtatacacgaataaaaggtgtctttattccccgacaaactatttttgcactggcagcacaactcgttttcgaatcaaagttattacaataatagatattactcaactatgtttcacttttgatttagggttataatttttctaatagatagtatattaaaaagaaggaggacctatatcttttatatttcaagaaatataattgtgtgggaaaatgactaacatgtcattgaaaaaaattctttatttagaaactttaacatgtttacggaaaaaactatagaaattttctatctaacatttgcaccaaaattaagtcttttataattttgattttcacctttatcaatttctattaacaagagcttgaatatcgattggctctttcattcctaaattatatatctatgtttttgttatttaagtgtgacaggcctattagcctgtttcgggataaaaggtctgtcaatcaatttaaatactataatatgaaataagtctttaatctaacttaaccaagaggtcaaaacatacttaagggtggcgaagcagattaattcgcccaaacattctttcaacttggcacaaaatggatttagtactaaaattgactcagtatataggcaagttaaaataaataaatgaaaaaaaaaaaacaatggattgtaagtagttggtttgtaggttgccttgccatagccttgttggaaaaaatacaaataaaatctaacaatgttaaatttactatttatttattttcaatacaacccttaatgttaaaaaaatatacatattcatttgaggggtaggcaacatcgatcaacctaatgatttattcgatagttgggttgactttacgggttatacctttcttttccacccttaagcttgtataaaggttggaatagnnnnnnnnnnnnnnnnnnnnnnnnnnnnnnnnaaatgaaaaaaaaaaaaaaacaatggattgtaagtagttgatttgtaggttgccttgccatagccttgttggaaaaaatacaaataaaatctaataatgttaaatttactattttatttattttcaatacagcccttaatgttaaaaaatatatatattcatttgtggggtaggcaacatcgatcaacctgatgatttattcgatagtcgggttgactttacgggttatacctttcttttccacccttaagcttgtataaaggttggaatagaccttagaaaaagacttataatgggtaaaagcacaagtaacatatattgttgattacattgtcgattcatgtacaaatttgagtgtcagggtttatttgtaggtacttgctacttttgctctttcgttgaattagaactttcacactatctatctatgaagcaccgatatcgacacggcgttttcaatacatttctgatatgaaacttcgatacttcttcaaaaaaactaatatttcggtgcgtttctgatacgtcttaaaattaaataatatttttttatataaagtgtatttcatattaataaaatataataaaaggaaaatcttaagcacaaataatagattattcatacaaaattgataaatacctcaactagtgtgtggatatggagtgctacaaataacattttcctccaactctggctcatctagggagcagcaccatctaaagctccaacatcattaaaggtatcaactgcatcttcactaatgtcccaatactgactttctccttcattatattttggattctttcttgacaagagccggaggttgctatgtatgtaaactaagtcttcaactcatttgggatccattttattcctcttcatggaatgcacaaaagagtaagtactccaattgcattcagtacatgatgaagaagagggttgtgcaatgagtttcaaagctagctttttaagcaaaacatcctttcatttgaacaaagttgacatactccaaattgactgtagcctttcctccacactagaaaaacgtctcctgaagaacttttttacttctaaattaatctccacaacattatttggagaaacttgacttggatcttcaacaagccattgatcactgtagtatctaccaaaataaaaaaaattaaaagtttcaaaatggattcaattaatataattattaaaaaaagttacaattattaaaaaaaataacttacttgggatgcaaagcatgtgccaaacaatgaaggggagttgaacttttggtccaacgatctataagaatacgatacaccacatgaaaaaatgttgattcctcaccattcatttgcccttcttttaagtatattacattctttaccttctcaatcattgcatcccacatatcataaaccaaatgaagacaaggtttatcagtatcacaaaacctaatcatatcataaataatgtctacctagaacttatcatccaatatcttttccttcacaaatcttgtccttccttgatgatcatctttctaaatactccgttttagaaacaataaggatttcaagatttgattctgagtattaattcttacaacctgaagaatgtggtaacatcatttctttcattcattcatgaaggacataaggttgtgtttatcttgaatccatctttgttaattgttctaaacaattttctgttgtattgatatatcattgagtttcttttaaagcatgctagagtagggttctctaatgtttgagattctgagtatggttctcagtttcttggtgattgtaattctaatagggttttagaattcatatctttatctagtgttgataaagaaatcacatgtaaaactgcatgtaaaagaatctttgatataataataactctaacctagtgttggttggaagcaactggatgtagcctctaaggttgagaggtgaaccagtataaattggtgtattctttattctatttttgttcatatctcattgattgaatttgggtgattaagaatttatcaacaagattttgtttcaaactttacttgaattccaagggtgattttggttgaaagaaagatttgtatttcaaaagatttttatgtgatacgatccatcttnnnnnnnnnnnnnnnnnnnnnnnnnnnnnnnnnnnnnnnnnnnnnnnnnnnnnnnnnttagtgctcattgtattttcatttcttgtattcttctgtcttccttgttcctggtcttccttcgtaattaaattttaagagagattgggttccaacaggttcaccagattattgttttaagttctctttttcatctcatgtcattagttttgcttctttcccttctttcagacatccatatgttaactgctttgataatgaggtacctatgctgttgctgctttatggtgatggaaaagctttatggagataggctacctataaagttttatggtgtatttagctagagtgaaatattcatggtttgaagaaattttcttagtcctttgatatgttttgggacagaattggtcctctctctgtctggtgcatggtttcttaaggggagatatattatatgtaggagacaagagagccataatgcaatgatgagcttatttttctcttttttttgtttgaggatatcttgacatatccctgtctttgtatttacttctttcttctctctaataaattaagtactgagagcaaaagtgtaaaagatagcgagtcagacattgcaattcaaccattgttatcaattgtggaaaatgactcagatgactgtgatttcacacaaaagtgaccaacaactgcaacataaaactgttccacagcaggccacacaagcagcaagggggtacaatacaatgcaacaaacctatagcggctccatcacataggattgactattatgctataaaccacttggaaaacatgactgtgatacttctaataatgttgaagaatatctattttcttattgcttgatatttaaaacttaaccatcattatctacttgttatttatgaatgcttttatgcatggtttattttttgaggctgtaactaaagttatctgttatgctatgacttttacttcagcaataaagcattttacattgaggaacttgaagagcagatgaagaaacttcatgaagatcgtgcatcagccatttttgaaagaagagccactaacaatgatgatgaaatggttaaggtagaagaagttgtaaaagctgcgatgtcagttttaatcaagaaaggtaacaatatggaagccgccaagattgctgctcaggaagcatttgctgctgtaagaaaacaaagagatctgccagtgaagttagatgaatttggtagagatctaaatcttgagaaacgaatgaatatgaaagtgagggccgaggctcgtcaacgcaagaggtcacgagcatttggttataataaggtcacatccatggaattggatgatcataaaatagaaggtgaatcaagcactgatgagaatgatagtgagagccaagcatatcagtcacaaaatgatttggtgctgcaggctgctgatgagattttcagtgatgcttctgaggaatatggtcaactatccttggtcaaaagtagaatgaaagaatggaaaagagaatattcatcaacctataaatatgcttatatgtcattgagtcttccactgatcttctctccgtatgtaagattggaactcttgaggtgggatccacttcacaagggtgtagattttcaagagatgaaatggtattgaactattctttaatttttttcagagtctttattggcacaagcttgttcttattagccgcttaattgcaccccatagcttgattatatatagatgtatattatacaggtatcttttaccttccatcaatttatattttgtattgggtttttctttgtcttaatcaggtataaattgttgttcacttatggtttgcctgaagatggaaaagattttgttcatgatgatggagatgctgaccttgaacttgtcccaaacttggtggaaaaggttgcactttctattctgcactatgaaatttcccattgctgggacatgcttagtcaacaagaaacagtgaatgctattagcctattactgctacaaaattgattgtgcagcatgtgtctcatgaaagtgaagctcttgctgatttgctattttccatttgaacacacttagctgatgctgttgctaatcttacagtatgttctgaaacccaacatttacatttacaagttacaagttagaagtacattttcatgtatcttattttatcataaaaagttaaaaactttgcacatataggtatattctttgttcattttctgttgatctgcatggtgattcttttatttatattcggcttgtattgtaggtactctgaattatgaggcatttgctgatcaatttctgatcctgtctaccttttaggtcccaacatggagtctgcctgtactggctgctgttccagatgctgcacgagttgcggcatatcggttttgtgtgtctgttcgattgttgagaaatatttgctcgtggaaggatgtattttcaatggcgatattagagaaggtttctctagatgaacttttgtgcggaaaagttctacctcacttgagagtcataccagaaaatgttcaagatgcaataacaagaacagaaaggattattgcttccctatctgggatctggtctggtccaagtgtaattggagacaaaaagtatgttaatggtacttggttaaatttttgttacattgatgactacatttgtttctttcgaataaaacattatgcacatacttgagactcatttgaatcccattactgtcaatttgcattctattaagttgtacatgcaattggtactattaagttcacttacagtgaggctaatgggattgtttgaaatttgagtagaggatgtaggttttaagatgtgataatcataatgaagttgtttcttaatggttataaagtcacttaactctagtctaaggtcatttgttatatcttttttataggcataatgagagtattacctttattattttgttatgatttttggccagaaatctaatacgccttctttccttctcatgttttagctgcaaattgcagcctctggtgacttatgtgctgtcacttggaaatgtgccagagagtgacacaagccatctagctcgtcgtttaaagaaaatacttgttgacctcaatgaatatgatcatgctaggagcatggctagaaccttccacctcaaggaggcattgtgagcttgcttggaattcatgtttcgttataattggtgtcttggtttgtcgtggagtctggccctaggttaacccacagtgcatttttagatagcttttttgacctttacacaagtcagatcctgagtatgcttatgatttcaaatcctgaggaggcatcattctctcacaacagagggatgaagacttaatggaacatttgaacctaattgaggacctccattgctccttgtgcaccacaatggggaagttttaccaggaaccgagcaatgagtattccctatatctctttgggggttcagagggagtctcgttttatcttactggccacttttgtcattacgaatgcttatgctagtatctggaggacattgtaaaattttccatactcatctgattataatttgcatttgatattgatatgaaataacttgtataaggtccattctaacattatttttggtaattgagtggatttggtggcgaggtatctagaggaaccagtgtgatggtaggtggtggtggcggtgcagaacgcaatagaggtgggaatcggcagcagagggagtgatggacaaacatgcgcaaaagtttgtgttgagctaaataaacaagtaaaaccaaacaagttttctaaatcttagcaaatcgaaaatgaaaactattttcagaaaatgaaaacaacaattgaaaatagaaaatgttttcacaaatcaaacacccccacttcttttataaggtacacttttattcttttttttaggaggttgttgaatttcttcaccaaaaggatgaactttttgctttcaatttcctctaaatctgatgtagaggaggtctacaatgcaacgcctcttttcttttagtcagatttatcatcctcggtaaccctattgagcttcaattagtgttctcttagctttctaaaaagactggctaaattcatagtgattaaatcctttgattcggcaatctttatcaccttaatgcgatacttggtttgagtatttttgctttttatatccaaagaaaataaaaaataaaagtgaaaatatttttgtttaaagtttagaaaatattttatctaaaaatattttcaaaaacatactcaaaactaaaaataacaaatcaacattttcagtatttttttaagaagtgaaaatgtgatgatgccttagagtatttttcttgatatatatttttaaaatcttgaaaatttaaaaataaaatttatttttcaaaaaatgaaaaaataaataaaaaataaaaacaaagaataagcattcaaatcaagcaccacgttctcatgtcctattttgaaatttgagcacctttacattaagctccccttaccaaattgtttacctaagcaaatcaagttattgacaatatgagtgaaacgtttctaaacatcaaagatagatacaccatttttcatgtgaaacatttcatattcttagactagtgtgtgcttcctagccttttatacatcagtagttccctcttgagtgacttgtataatgtcccccgtttctttttgcagatttgtattgagaaacattaaagaactgatcatgtgtcaatgtggatattattatgtttttagccttagaaccatatggagcctttcttttctcatcctgagtctatttagtcatgtttttctcttttaactctctcctttaacatcatgcttagaatgtatggtccatttccacagcattccgtattgctacatcaattccctcaataaaaatttcattctaattttttcaataggcaaaaaagtacactaaatatgttccatcacagtaaagtaagagcctctggcatcttgtttctttttctcttgaccctttctctcgttatcactgcgcgaaggtggctgcatatgctccacaacaatggttccttatgttgaaatattcaatttgttttgtgcttcttttcaattttgttactttgacatcaaatttctgagctaataatcttggaactgtatagagcatatgtttgttgtgttgtatactagtgtggtgagttgagcataatattgtatatatgtgaaactatgagaaaaagatacattaaagttaggataaatggcaaagtccgtatctaaaggtgtgatgcaattataaaattggtattgtgaaacacaattttagtttttggatgtgcaaagtttacaacaaatcagtcctactgttaaatttataaaattattttgtcattatgtaataatgttcaatgatcaatttgacaataagttatatttttcgaagatcaatctagcattaagttgtaaaatttagaaagcaatttaaactgtcacactaatttatcatattttttgcacattattcaaagactaaatttaaaaatttaaaattttcattttttatgaactaatttgtcaatgtcttacgatttaaatgacgaatttgactatttaaacttaaagttatgaactaagaaaactgttatctgctcttccttcaatcttagacttgacacaggtcgctgctcattgcccctaacacccctgctgctgaaactatgcttctcgtcaggtatggcaaaattttgtgcttttatctgtgatcactggcgaacctacgttgaaggttgggagggcagtgccccccttaaattttcaaagtaaaataccaatatatcctttattttaaatttttttctaatggattaatttcattctcacatcaaccaatagaaacgcgtccttcctctattcctcaccttatttgctcaagaggcaggttacgcagccactgcccaccgtcacggcgtcaccgatcgacgcggagtcgcgaaccacgccctagaggcctagaccaccaccaatttgccaccgtccccgcaggccacagccaccgtcacggcgtcaccgatccacgcggagttgcgaaccacgcggtccaccgtcgcgccaccacgtggagtcgtcgaccatcgcgccaccactgcccacagcaccggaaattcgtttgccgcttttggtcgcgtcaccactcaccggaaggtttgcgccacttgctactattttattttttgttactttaattatcagccctctttttaattcttctattgtatttgatttttactaataacataaatatcattaagagaaaatgtgatcgagtgattacttatcagtggtatcctctagaagactagaacctactaaattttttgactagtagttacttttgctttgataaggggcagacagcggactcacaattatctactacggttcatatataaaatcaaaccaatttatacttattagataacaaaaagaaatcaaaacctattatacatggccaatcaacaaaagcaaaacaattttttattaaaggttttattattgtccttattaacatttaaggacatactactaggccttaagagataaggtaagaaacattgaaagcataacaagtttcacatgagttgtgtgattgatttagtggttgactggttgcgcttaatcgatcttaggagttagagggaggtcatgattcagagtaaagagggaggaagaaatacaagaaaacgtgaataaagaaaaaaattgaaaaaaaataataatatgaagagatattatatattgggctgttagaatggtaaagggctagaggctgctgccaaaaagattttgcttcctgcaccctatttgctacctaaagaaaacgtgaataaagaaaaaaattgaaaaaaaaaataacatgagttgtgataaattgataattgcatttctaaacatgttgaagtcactttgccagcttaaggcagaattagtgtttggctttattatgtgatataaaagaattgtgttatcaactttaatattttaattgttattttagaatttggtgtatgaataagcaaattgttaatattttggagtatattgattccaaattaggtgtgtacttatatcttgattcatttttgtcattttccattttttaggatggaaagatatttaggttctttttctacaaagtcaaatggtagtagtgctaaacgttctcgatgtgaatcttcttcatctattgatttagtttaagataaaccaaatgagtgttcaagaaaggaaaatgatttgtatgttcctgatccgggtaaaagactttctattatgagcattgcaaagagtgatcaagaaagggaaatgattcgaagaatttatctatcgaatggtccttgtcaaccaaaacttgacaactttcctcaatccttaattgggggtaaattgcgtagatttaatcctcaatggtacaatgagtttgacacttggttggagtatagtgaatcaaaagatgttgtattttgcttgctttgttatctatttagttgtgagcatggtgatggaaggggtggtcatgattcatttgtcgtagaaggatttagcaaatggaaggacaaacaacgactgattaaacatattgggaaagttggaagcactcataagttgtgcttaagtgctgtcaaagatttgatgaatcaaaatcaacatattgacattgttatgtctggcatttctgacaaagccaatcaggattatcgtattcgtctgaatggttctattcgatgtgtgcgatatctcatatgacaaggtttgggtttccggggacatgatgagactgatgcttcaatgaatcagggaaattttgtggaacttgtaaaattcctttgtgaaagcaacgaggaggtaaataatgtatctttgaataatgccccatagaatctcaaaatgatagttccctcaattcagaaagatattactaatgctgctgctagtttaattaccagagctattatttcagatattggggataatttcttctctatactagttgatgaagctcgtgatatatcgattaaagaacaaaaggtcattgttttaagatatgtgaactgcaacggtgatattattgagcgttttcttggtcttgttcatgtttcagatactacaactagttcacttaaagaaacgattgagttaatttttgccaaaaatggtttgagcttgacaaagattcgtggtcaaggttatgatggtgcaagcaatatgagtggtcaattcagtggtctgaaaagcttgattttagttgaaaataattctgcttactatgttcactgctttgcacatcaacttcagttagctctagtggcttgtgcaaaaaaggtttacgcattgactgacttctttaatttcataccgttggtctgtaatgcagttggtgcttcttgcaaaagagtagatattttgagagaaaaacaatttgatgagatagtcaaaagtattgcaagcgatgatgttcaatcagggagaggtttgaatcaagaaatgagtttgtcacgaccaggggacacacgttggagctcacattatcgatcattggtaagtttgtacacattacagtataattttgttcaataaatatagcaaaaaaacattacccacaataattgaatagataaaaaattagaaaacaagaaattttttcggtgttcgaagattaaatcgcaattttaaggcacttagaggcctcttttgggaaaattttttgaccaagtcccctttggcaacttgcccagggcttctcctctcaatttcgagcgcgtggccaccgatttcgcctcaatcgaacatcccagtcaaaagttatggtcttccgaagttttcattcacaccgcgccaactgtgcctgtcacatgcaccacctgtgcctgccacgtgtcgcatgctgcttaaatacgtcccatttgggcgtgttgtaacacgccccatgcaggcgtgttcaactaccccatttgtgtaaataagtttcaaacagccctaattccgtaaataattaggaaaaaaataccatttaagttcttttgccttcaaaggtgttattacaaaagacgagagataatgggtgggataatttatttcagaagacttttgcattttgtatcaaacatgatatagatatccctgatatggaaaatgtacttgcatcacaagggagaacaaaacgtagataaccagttactcatctgcatcactttaaggttgacatattttatgcagtgatagataacttgaagagttgaatgatcgttttagtgaagttagttcgaatttgttgaaatgcatgtcatgtttaaatttgtgcaactttttctcggcatttgacaaaaataagctgtgtgaatttgctggattttgtccttaagatttttatttgaatgattttgacatgcttgaatatcagctcgacacgtatattgttgatgtgcaaagtgatcttgatttcttgaatatgcaagaaatagctgatcttgtcaagaggatggttgaaaagaaaaaacatattgtgtatcctttgatttacttacttgtaaaattagcattaactttgcctgtagtaactgcatctgtggaaagagcatttttagctatgaaatacatcaagattgcacttcgtaatcggatggaggatgaatggttgaatgattgtttagtgccttatattgaaaaaaaaatgtatttgaaagcattgataataaggcaattatgaaagaattccaaaaaataagacctagaaggatgacattataattatttttttggatatgtatttgaacttttgagtgtctccccttgatttattttctggatccgtcactctctgtgatgcactattgttggcaagtgtgtggctattagtcttggctgcaggcacatcatgattgcgtcttccttcgtatgttgttatgacagctttaggatccattgaagccctctcaacatgcttccgaacattgcaaccttgggtcgtgcatttgtaatagctcctacatataataaaaacatgaatcaccttcttttccaagacaagccaaaggtacaaagcagaatagtggagaaataagtggaacgaaagagcatgatataacgagtagcataatctgactatgatgaatagttaagcgttatgggaaccaagtttcttgaaaattgatatggacaatgttaggaaatacaaaatgattaaatgatgggagatatcttcattaacatttcacaagcaaactaacataaatgaacttcacatcatatctaactcaaatgccttaaaacattagatgtagtggcagatccagaaattttatgctgtggggcaatactcatatacataagtatgtgggggacaaatattatagattaacctttttatactgcattttaaactatgggagcaatttataatggtgagcctttttcactcattttaaactcatgttaaacttatgttgttgaacttgtccttcatactttatttatggctttttttcacttaaactggtcagttaacagacaatggtaatgctcgatcatccacaattattcattaaatataagcaatcaaagtgtagggggaaaaccaatatcaccttggatatgggttgcctttgacaactttctgcccatatttgcgccatcgatatccatcatctaagagatccacttcacttgtttgcacaatgattctaggccctgcaacagatctatgcaaagtggctggatcctggatcctggcttctgtgtttctgcagaatcataaaactttccaacatcacataaaagccaaataattacccaagcatgaaaaaaaaaattatccgtaggaattgaacatggtaccagggagtttataacactcacacactctgctcaactatctgaactaggcccccttggtagcatgaacaggtttacatgaactaattaacccttaccttctcttggcatcaggttcatcatttttctcatctacttcagtttcatggtcacctacttcctcactatcacttgtttctgatccatgttcacctgtggcctgactagaccctagatccatcttagacactgaattttcatttgaagtttgtgtttctttcgcaatcttactgtgatgaggacgttgatgattgtgctctcctttataaataattgcagtcacatgaccctcaagagaacgctcaagtttttttcttcacaggacaatttggacgtgtgcacttataataacttcttgagaagtcactacctttcacatgtttttgcccatacttcctccagttgtagccatcatgattaggcttattatcaacattcacagaagaagactgcaatttttgttcagagtgagaataatcaagggattctttcaccttagaatctgacactgagggtggaatcagctgttgtgcagcacatgatgaggtagcagatactgctgatatagagaatggatgttcagagtggatttgcacagcatgagatgtaatctgtgctagcatctgctggtgtgttattccaaattggccctacattacatgctttataagtcaaattgtgaagagaataaggaaagaaaacactttatagtgttatcttgacaaaaaaccttggctgtgttttgctgcatcacttatcctttcatattatgttgttcagtcatccttaatttcatttacaataagtgtatatacagctatttattattatgtacagctatttattattatcctttcttgttagttatctcatggaccatattttagcctaaagattctcttttaaaaaaataagcctaaagtttaggtgggaagaagtaattcagttctgctttatgagaaattattacataattcatgtttattatgatcctagtaggtattcatgtaggatgtaatcgagttttaataatttttttataaattaaaatacttaaatatatacaacgtgaaaattgattgaaattatagactcatactaatcctaaaacatgcaataatttcnnnnnnnnnnnnnnnnnnnnnnnnnnnnnnnnnnnnnnnnnnnnnnnnnnnnnnnnnnnnnnnnnnnnnnnnnnnnnnnnnnnnnnnnnnnnnnnnnnnnnnnnnnnnnnnnnnnnnnnnnnnnnnnnnnnnnnnnntcaatagcaaatacaaagttcagccgtgtcttccttataatagtaatctccaacataataaagatttccccaaaaggaatcccatgacccctaatgaatgaagtttaaagattcaagagttgtggagacaactttcataatgaaagtcatattaatgaaaacctattttctaactagaacttaagtctattattttaattaaggtgttggtaacaagtaatttctgctgaaaatcataactaatattgctcaaaattatagtattttataaattaacacaatttattttatatttgaatcctcacaaattactaccactaatatcaaccgtttcactttaaattcaagtctatatgtccttttggtaacacacattttaatcacatctcatgatttaaaaacaattttaccaaaatgatcaattatataaaaatctaaaacatacataattataaaaccttttagtaatgtgttgttgttggtacaaaatatagcaaatgagattatgtgttattacttgagaaggtgaatcgatgaacccaggtggaagcgtgaacgtggtggtgggcatgggcgagggtgcggtagggtccaccatggcgccggcgaggagctccgagaactacttgcactcatcgccgtcgccgaagaagttggaaagcagagtcatgggaccggggctatacccgccgctgaaaacactctccacggaggcgcgtggccggagagtggttccgtgacgtgccgccgtcgagggtggcgatgcttgctcacctcctccctctccatttccgccgtcaaccattcacttcgaatgaaccaaagacttttaacttttttgttttttgtttttcttttctctctatttcggtgtgtcttagttttttggaaactaaactgaaactctaatgaaaagtatcaaaccttttttattgtcttacgatgattctgttctgtttggttggtttgatttttttggtttcgtgaatcccaattctcgatttcagcaaaaaagtccacgcctctgatacgggagaaaagaaagaaaaagaaaaaaagacatgttccccattttctcttctcattcacgaatgaacaaaagtatactactagtatacttgatttttttaattgcataatggtagtatcattttatttcttatctgtataaaagctcaaccagaggaacattaattggtgatttaagtaaaagtttcacatacaacttgattaaaatatttattttggattcatgttaaaatggttgagaatcacgttaaaatagtactatttgttaatgtgattttagctataagtctaaatttgtatacttagttttatgttgaaaaactagttataaatctaaatttgattttaaattaaagaaattttaggaaacttacattaattaatttataaaattaatttcattcaaattaattttctacccaaaacatacgggagaaagttttcttaatgatcagttcatcactcttgtgagtaaatttttgcattttaattcctgatattgtaaggatttttctaacatgtgtaactttgcagaagataaatcttattaattatttattcttttactaattatcactaactaattattatgatttcctctatcctatttagtttttagacccatcttaatttaatctctctctttctatcaataaaatagtaattaattaatacatattcaccaccttaaacttttcaacttaagtattctatttgaatcatttttttttgggcgcatcactgtgatattctccgctgcaacaaagcttaattatcaaaacgaaagttcttcaaagctttacacattcaatagacatatgccaaatggccaaatggccaaatggcttggaaaagtcacgtacagtcactcagtgcagattttatatactcatacaatcatgattcattcttaacgaaaagataatttcttctataacatcaggattttttcgtcaaaaattttctagaggttccaaaataacttgattaatgaccttttactttagttgtaataagagagtcttattactcttgagattgatgaatactattttgatagaatgaaatgactgtacagctttaagaaacaataaataaatactaattatcattattttattaataggtagaaatagattatgtaaaaaataagtgaagaaaaatcactttttttaagaaatcataataattagttagtaatagttagttgaagagtggataattaataagacttatcctgtataaagttacacaggttaaaaaaaatcgatattgtaaaagcatattaaaccttattagttaataatgaagaaaaataaagtaagaattaaagtgaatgaaattttataatattttatgaaaaagttttatgaatttgaggactaagaaaatattacttacaacaatcagatattaaaaagaaaagcattatatagaaagttctttctctcatttattttaagtcaaaaattgtaaattacgggtgtttctgattacgatttgagagagagagagagagagagagagagagagagagagaatcggtttaaccttagtgtgtgatagggtaatgagtattagtgcattgttggaactgaccccagaagagtattgaaattgcttgggtttggtggaggtgcaccaatggtgtgtggtgacgtgaggggtagtagcgagacatggatgatagagaagtcagtgacgttgtgttgcgtttgtctttgtaaggataataaagacaaaactcaagtcagtcaagtcaagtggagtaacaaaaactgccaaacactttttttccagtataatactcagagacagagaattggagacattgaccgtactgtcacgatttcaaaaaaaatttgccggaatgccacgagagagaaactatataccaaactgtcatgcagcataattcgttgggccttgtagcgaattatgcgcgctgatgtggcgccaggatagtggccacgtaattcactatccactccagcgaattacgttgtcaatgcgtcagtctgtgcactgacacagcaggccacgtgacgagtcccccttaattcgctggggggccctagcgaattatgccacgtaattcgctgcccccctagtgaattacgtggcggttactgcaacctttattacgtggccataattcgctgggatacctagcgaactatgccacgtagacataatttaaaaacgctggtccccccctctcattttttttactttcactcttccctctccattctgcctccctcactttttttttactgctgcatttcttttgctctctacccatcttttaaaatttatttcctacattcttcatctatcatttggttcttgttatcatctatcatttggttcttgttattacaagtaagttgtgtttttatataattttttttgttttttatgttattgttatatttgtataaatatatagatgttgtgattgaaacattaggatagaggatatgttgttttaggatagatgatagtgtttgtttgatgatatttgaccattatatgtagcttttaatttttgatcatttaatttgttatgcattatattgtaattttttttattaagatatagacattagggttgaaacattaggttaaaggatatgtagtttaaaaatagaattgttattttttatgatagtgtgatagtttttatttgtttttagttgaccattatatgtaagttgttatttattatcattttatctgttatttattatattgtaattattttattaatatatagatattaggattcaaacattaggttagaggatatgtaatttaaaaatagaatttttaatttttaggatagatgatgatgatagttttatttgttattatttgattaggttttaaacataaaatttgaaacatgaagtttgaggatttgtatttacaaattaattattgttaattttatttgattatttattattgtattaataattagtatatatatatataatttttgtagaggtaannnnnnnnnnttatgaaactcaattaatattcgaaaaaatagtcgttaacatagtaaaaattaaatcttttaagatcaattaaaaaaaatctaatattggttgtttgttgaaaaatgagtcttgctatgttttcatcatgtatatgattccttcttaattttaacattggttagattctataattttgatgtaaataaatctaataagacatgtttaatacttaaaatatgtcaaaaaagaatttaaaattatatctcaaaatcgaaaacaatcattattttagaatgatcaatttgatccaaattttaaaaataaataaaaaatatgatttttttaagatgaaatatctaaataaatcttaaaataaaaagagaaaagaaaaaaaatatgattttgcaaaaannnnnnnnnnatttgattatttattattgtattaataattagtatatatatatataatttttgtagaggtaatttttgtaatagttttaattgttataataattataataatttttattttgaagtgtttactattttatattttagtttttataaataaattataatttttatttatttattgtattttaatgtattttttgtttttttaatatttattatttatttattgtttttaatgtattttatattttagtgtgtttattgttttttgttaatatttattaagtattttatatgtggtatttattgtttttgaatgtaaatatttattctagtaggtaaatatttattgtttcattttttaatttaaatattgttgtactaattttgttaacttattttataactatttaacttatttttaaaatatttaagttattattttgaacgtattaaatatttaagttattattttgaacgtattaaatatttaagtacttgcgctcctgacccatctcccaattaggtacttgcgctccttccatgtcatgtacatcctcatctggttgagaccaattgatattcgtgtaatgcctaacgttagaccaaaatggcacattggcctctactgtataatcacacattaaacacattcatatgttaaactggcaaacaatttaacactactaataagtacacagttttgcattcatacctgcaaccgaaactggaccttgcattccgacaatgcccggagaaggcatagcaaattcacgatcaaaatcaccgtctacatccgtatctgatgagtcagtatctggaacaacaccttcatcaacctcttcttcggaactctccatgggcatttccggctcctcaccagctacagtttctacatgttgttcctcgaaatcttgtgtcggttgcattgctggaggtggtgacattgatacatctgtatgtttcgaattcaacattggttctacgttaaggtcaatcgaaccaacgtttcgtacaacattacgactgcttgactgtccaccgaaattcacttcagcatacaactctataaatcttggatctcctccttcggatacgcatgcatctgtaactaacaacagatcgtcatcatctacaacatccacactgtaacaccccgtaggcctccggtgcgttatcattaataatatcagataagcgtttaaaacatgcaattaaaacaaatcagcggaaacacaatcgtttttcttgattcattatgtatggaatacgcatatcgcagagaaaatacatgcaagaacatataatacacacctctgctgatccagtttttttttaaatcacaacatacatagacagataaccaaaataaacatcagttatactcaggaggaacatcatatacatacatcatcatcaattctgtacagacatatacaaacagtcctcaccacacggtggtgacacaaaataatatcagccctcatcgagggtatacagaactgtatataaacaaaatccaaaatgagctctcagctctccatgctgctcctcagtcaagcagctatatnnnnnnnnnnnnnnnnnnnnnnnnnnnnnnnnnnnnnnnnnnnnnnnnnnnnnnnnnnnnnnnnnnnnnnnnnnnnnnnnnnnnnnnnnnnnnnnnnnnnnnnnnnnnnnnnnnnnnnnnnnnnnnnnnnnnnnnnnnnnnnnnnnnnnnnnnnnnnnnnnnnnnnnnnnnnnnnnnnnnnnnnnnnnnnnnnnnnnnnnnnnnnnnnnnnnnnnnnnnnnnnnnnnnnnnnnnnnnnnnnnnnnnnnnnnnnnnnnnnnnnnnnnnnnnnnnnnnnnnnnnnnnnnnnnnnnnnnnnnnnnnnnnnnnnnnnnnnnnnnnnnnnnnnnnnnnnnnnnnnnnnnnnnnnnnnnnnnnnnnnnnnnnnnnnnnnnnnnnnnnnnnnnnnnnnnnnnnnnnnnnnnnnnnnnnnnnnnnnnnnnnnnnnnnnnnnnnnnnnnnnnnnnnnnnnnnnnnnnnnnnnnnnnnnnnnnnnnnnnnnnnnnnnnnnnnnnnnnnnnnnnnnnnnnnnnnnnnnnnnnnnnnnnnnnnnnnnnnnnnnnnnnnnnnnnnnnnnnnnnnnnnnnnnnnnnnnnnnnnnnnnnnnnnnnnnnnnnnnnnnnnnnnnnnnnnnnnnnnnnnnnnnnnnnnnnnnnnnnnnnnnnnnnnnnnnnnnnnnnnnnnnnnnnnnnnnnnnnnnnnnnnnnnnnnnnnnnnnnnnnnnnnnnnnnnnnnnnnnnnnnnnnnnnnnnnnnnnnnnnnnnnnnnnnnnnnnnnnnnnnnnnnnnnnnnnnnnnnnnnnnnnnnnnnnnnnnnnnnnnnnnnnnnnnnnnnnnnnnnnnnnnnnnnnnnnnnnnnnnnnnnnnnnnnnnnnnnnnnnnnnnnnnnnnnnnnnnnnnnnnnnnnnnnnnnnnnnnnnnnnnnnnnnnnnnnnnnnnnnnnnnnnnnnnnnnnnnnnnnnnnnnnnnnnnnnnnnnnnnnnnnnnnnnnnnnnnnnnnnnnnnnnnnnnnnnnnnnnnnnnnnnnnnnnnnnnnnnnnnnnnnnnnnnnnnnnnnnnnnnnnnnnnnnnnnnnnnnnntctctgaggtttctctcttgaggattcaacctctgactcacaatgggttttcagagaaaggatgaaggatttttagctttctaatcggttctaacaagattatgggtctcaagaagatgtttaggctagtatataagggtctaggaaagcttggaactgctctaatggaggtccagggcgtagggaagaagaagaagttttcttcttcaaaaacgcgatctgccctcttatactcagcctgcccgaactcccgcgcgatccgcgccacaatgtcggtgaactggcgctaccagcgtgaaccgttcgagacctttggtgctacccgcgccacctatggcgcgacccgcgtgagaatccagagaaaaatcaatttccagagcacttctggcgcgatccgcgcggcccttggcgccaaccgcgccagactctctgatcgcccaagctctcagcgccatgaccacgccctcagcgtgaactggccgaacctctggcgctactagcgccgatctggcgccatcagcgccacatcttaaaggtatggcgcgaccagcgacacacctggcgcgacccgcgccgtactacagaaccaattttctaaggaagaaaactgaggctaggggtgagggtccttacacacacctacccattgcaccgggttgccgaacgcacatcgagcactcaatcgagatacactgaccccgttgtaatcttagcttcttatatatgattttcatcaaatcatcataggtgcaacagggaggcatacgaaacattttactttctccttcaaatatttgaccattcggtctaatatattttcttccattatagtatataatggtaatcaaaccatttctactaccactcatgttgcaaaagctttcaaaaatatcaacaccgcaaaaaaaccctctcaaaatgcctcatggaacaaaaatggtgcgggaggatttaaataggggggtaccagcagtaattcgctgggctgggcagcaaattatgacacgtaattcgctaggggggcagcgaattacgtggcataatttgctagggcccccagcgaattaaggaggactcgccacgtggcctgctgtgtcagtgcacagactgacgcattgaccacgtaattcgctggggagggtagcgaattacgtggccactatcctagcgccacatcagcgcacataattcgctacaaggcccagcgaattatgtcgcgtggcagtttggtatatagtttctctctcgtggcattccggcaaatttttttagaaatcgtggcagtacggtcaatgtctccagagaatctctactgccacaggatcgtaaagttgagatcggttcaagaaactttttttaggttcaaataatctataaaatagatattttatgttaatcttttaaaaaaaaatctttaattttgattagcaagcatgacacaacaataatattcgcatctcattgacttgtcatgatattaaaaaaattgataaaataatgtataaaactttttttataaatcatattttaaaaaatagattttaaaaaattatatatgattgtttgtcctattagactcgtgatgattaacaacgagttaataggctacctatatttttgttatatcatccattaatattatcacttaaaagcaagagctaaaactaaaattctaaattttacatagactgaaataagatcttaaataagatttaaaaatcattaattatagcaagaaaataagattagtaaatatgggaagtaagatgagtctttattttttaatactaaaaatatcttttgtgaataatatatacctattatgaaaatatgaggttccaaaggataaatctctttaagaaaaggggcataaccggtattttaaatataaagaaggggaatcaagtgtcctgagcaataatggggagtgtaaatagcaagtgtcatagtttgtttttttaaaatagttagagagggacatgtgtcgnnnnnnnnnnnnnnnnnnnnnnnnnnnnnnnnnnnnnnnnnnnnnnnnnnnnnnnnnnnnnnnnnnnnnnnnnnnnnnnnnnnnnnnnnnnnnnnnnnnnnnnnnnnnnnnnnnnnnnnnnnnnnnnnnnnnnnnnnnnnnnnnnnnnnnnnnnnnnnnnnnnnnnnnnnnnnnnnnnnnnnnnnnnnnnnnnnnnnnnnnnnnnnnnnnnnnnnnnnnnnnnnnnnnnnnnnnnnnnnnnnnnnnnnnnnnnnnnnnnnnnnnnnnnnnnnnnnnnnnnnnnnnnnnnnnnnnnnnnnnnnnnnnnnnnnnnnnnnnnnnnnnnnnnnnnnnnnnnntcatattttaatagtagtataattttatcattttttattttattcttctaactttttatttgaattttttttaataatttttatcaaggaatttgaacatttcactcaataataattctttcaaccattatcgtctaacataaacacaataataaaatcgacctgttttatttgtgatactcgtttaattttatcatccaaatgaaaaaaataaacataaacaaattttgaagagtgtgacaaattttggcaaaaaaaacgaaaataatacaaaaaaataaaaaattacaaaaatggggcagtttggaaactatttaccaatcnnnnnnnnnnnnnnnnnnnnnnnnnnnnnnnnnnnnnnnnnnnnnnnnnnnnnnnnnnnnnnnnnnnnnnnnnnnnnnnnnnnnnaatgcattaaaaataaaaatgatttaaagaataaaaaatcaaattttttaattagattggatcaaattttagatttaattttaaaaattgatccaaatccaattttaatccaacttatacatatgtcttttgcctaagagcaaagtgcatcaaacacaaaataaatagaaaaactcaaaaaaagttttagtatccaattagaataatagagaaactaggtgcatatagcttggcgcattgatctaaagttagaaaaatatagtgataaaattcttaagtgagttgttattcccactattaagagtggttcttagcaagttgttattcaaggattttagatcttgtgaggttgttgtttgagaagaaggggtatgtcactcaatgattgttgttatgtagatataatcaactatatggttctttgtgaaattcattaggatgtgtgatcataagggtttaggattcagagaagggtgtcccttaaaggttgtttatgttgtaaacattttaattgcttccctgtcatataaagaagttttaaaaattttagaatgtataattactaaggagattcgaagatagaagtcaactcaatgaaaggaaaatcatgaaaatccacaacattaagaaaatgatctagaagagtttgatcttaacctcatggcagagcaactgaataatgaaaaacacaagttaaattgaagaaactagaggaaggagaaaaggattatagaaataagaaaaacattgttttcatttaagataagaaggatgacgatgatgatgatattctcctcctggcaaaacaactctaaaaaatgatgccaaagggaagattctccaatttcaagagaaagaattcaaggaagaagagtcatttttcaaatgcaattgcaatggatgtgggaaattttggcattacaaaatagattgtccttcattaaaagtgaagtcgcaaaagcttgacaaatcaaagaacaaattaagaaaagggagcatacatagaatcagaagatgattagtagaactcctcataaggcttgaaaaaataagcaaatttatttttaatgacaaaatatagggtcaagcggatctaactcagttaattgaggagagaaagtaggtgaattattatcaatttattgaaactattttcaattcccacaaataataataataaaaaagaccaaacataaaatacaagtattttgaactctaattatggtgttcccctagtttttataaattgtcacaagcctttaatgaaatatctgtagaggtataaatatagaaatgttcatgtgtagtatttaaaaaataagtcatctaattttatttcctctgttttgaaatatgcaaattgtagtccctattttttagaaaaatcgtctccttttaatctctaacttatagaaataggaaccacacaacacatttccataagtaaaatattaaaatgtaactttatagtccaactcttggacaatcctttaaaaaaaaaaaaacgcttgaccaactcttaacaattcacaaaatttaataaatggcttttcagtactattcattcaattaaacttatttaaatgtcaaataaaataaaaccccatgatgcaaagtaccacagttaaaatttgaaatcatgaagtagaaataagaatataatgaccacattaaaatttgaaatcatgaagtagaaataaaaatataatgaccacactatactttctcataataattgaagccttcttttaccttctggatggttcctacttcctactcatgccacaggtcatattatcacttcatcatttatcttgatcgcaggaatgtgagcaatcttagaccagtgtttccctttccgactttgataccttgcttctagtaaaggacaacgacgtatattcagtaattcaagagaggatggaagctgatcttcgggcaaggactcgaggcttttacaatcccggatgtcaagctctgtgagggaagtgaggtgttgaagcccttttccttccaacaactttaaatcatcaaaatcccatacggacagatgttgcagcgaagtgggcagtaagcactccttcaacagggtgttaacatcttcctccccagaaccacgaatgtaaagatgagacagagaagtgaggcggtggaataggaaacctaactcgtgtttagacattgatgatagcattccaacttcaatagagagtgtttgtaaactggaaggcaaacaccttgggggcaatgacctaagtttcttacaattctcaactagaagatgagttaatttgagagcattcgttccaccttgagtagtaattgcttccatgttgggacatttcaagattcgaagatattgtagggaagagaaaccatctaatggtaaggacgccagggaatggcagctattgacaattgacagatattcaagtgatgtgtatttgtgccatgattcgggagacagaaattctaagttctcacaatcgtaaatgtaaagtgattgcaatgacgttggcaagccatcggctgggaaggaaatcaaattggggatatccgtaagagtcaaactttggagacaattggcagctagtatcattcttggcaaagatgacaagctgtcacatttttcaatccctagattcctgtaagaaaagttgtcaagcaaggacaacaagtcttctcctgcttctctaaaccttattgcttcaattgatgtgttccaatgtagatcatgtgattttgcctctagccggttgcactctgatatactagcctctgtcaacgaaggtagatgattgggcaagtttcctctcaacttggggcattttgataaaatcaaacgcttaaggcaaggaaaaggagatttgctgccttcaccttcaaatggtagccactcttcccactctgacatctctttgaactggatactctccaacaacggaaatggttgaaatgaaagggaaaccctattgttgcagtagaattcttcaccaactgtcttcaccattttcatcctttttatcacaagctccttgagagaaggtagttgtccaaatggtggaagtgaaaagcaatagttgcaatcagtgatgccaagggctgtaacataagaatatgaagtgtcacccaaccatttaggaaagcttgtgccattgtagtatcctatgccgagtttctttaaatttgtagatggttgcaggttctggagtacatctttctcaatttgtgaatcttgtggctcactgccccactccaacctaagctcctcaatatgctctttcttctttaagtcagcttgaaaagcatccttgggatcaacaacattttgtaacctcaaaatggaaagcgtaccttgcaagtaaggaaactttcttaattctctgatatttactccatcttctctgcctacaacaaaagaagtcaacacacggagatcttgtagcttgcttatttgtgctggcatctccgtcaaatttgtgcctctaatatcaaggtggcgtagattgaccaaatttcctatatgttcaggcagctgattgatggaagtataggaaaggtcaagatatcgtaaaagtaacaaatctcctatctgttcagtcaactctgtaagatatttacaatttgataatttcaaagtctgcaaattgtaaagcctaaaggttgcatcaggcaaacttttgatggaagtataagaaaggtcaagataccgcaacagtaccaaattgcttattgaatcaggcagctcagtgatatttctatactcaatcaaggacaatgttcgcagatatgttagtgttggcagccactcatgtgtcacccttttggatacactattagaatattgagatagtggtaaaaagctgcgcaaaagctttagcccatacaagccctcaaatcttttagagacatcaagatttctgggatgatatgtcagatggcgaacatttattgggacttctcctccttcaaagtaacaagatctcttaccagagactagtctggctaaatcgtagataaggtcatgcattcgaaactgttcctttccctcatttttgtctttttcaattaaagatctagataacaattcattgaagtagtcttcacctgctgattccattgctttctctccgtggatttgtggaagaaagccttcagccatccataacagaatcaattccttcctatccaacaaatgttgtctaggaaaaattgagcaataggcaaaacatcttttcagatgtggtggaagttgaagataacttatgcataaagctggtaaaacttcattatttgcccacatgttgctgttcagaatttcattccaatactctgcatcaacatttgatcgcaaaagacctcccaatgttttagctgctaatggtagacccttgcattttgttgcaatttgtctaccaatttctgctaggatgggatatttgtcatatccttgatttccaaatgcatgtttagcaagtatacaccaacagttgtcatctgtaagaatcttcagctcgtgaatgggaaatgtactagtgatttctgcaattctgtgttgtcgggttgtcacaatgattatacttcccttcttcccacagctaaaaggggctattagttgatcccaatcatgatactgcatattccaaaggtcatcgagcacaagcaaaaaaaatttatctttaaaggtgttcttcaattcaactcgaagagcatcaaaattagtagtatcacaagtttttgaagtggcagattcaacaattgccttcgttgccttaaacacatcaaaaggatcagatacccatgcccaagctttgagatcaaaatggttctgcactgcatcgtcatttaaaaggctctgagcaagggttgtttttccaagacctcccatgccccatattgtcagcacttttatgtgattattattctcatcttcatcagagagaagcatggtcaacagcttctttttgtcatcgtctcttgcaacaacatattccaccgatcgatctgtatcttttcggtaagagactctgccagcaacacttttcaaaccaagaatatctttttgtttgataaaattttctagccttccagatattgcttcaagcttggaattcatgctcctatagaattgattaaagggagaagaaagtgatgaccacacctggcttttaaaggttttgtattgttcctccaccttgcacctcagagaatctgtgttgatttggtccaacaaatcctctgcgtctaaaacagcatctttcaactcatcaagccatgccttcacttctgaattagtgatctgtttctcctcagcatcattgagcacagcactgagtgccaacagctttatcttcagctcatccaagagagaaacattcagctttctattggcaaagaaatttcgaaactccacagaagttatcctatccagcaagatctccacagaagcagagataagtgcctctcccacaatagccaaagccatctcttctctagttttgcaaatagtatcagatctctgaagctttagtcaaacgctgaaggttatatcttagctagtgaggaattagggtatgatcataaatgttttatttgcctgtctttgagaaaacaaagaatagtacaatagtttatttcctttaatgtgaccatccaaccactctgcgtttggactttttcaataatgtatacttcttcggtccttcctgatgtcttctgcctatgaagtgtaataatacagtgaatttcagcaaaaaaaacttaataagagttaattatacatttttctgaattcctaaaacttgacacctccctcattcctcagttcgtttgtttaatgcttttaaatcagcattcatgatttcatgttctattatgcaatattatttgcttagtatatatctaagatgccatatatcatttactctcttaaactttcttaaacggcctacactatcgcacgtgtaattaaattgttgttgtaagagttagattccctactcttttgtctttaattgattcggaatccttacaagaaaagctgagattaactcttaagaacattgcaacattgcttacaaagtttgctgggtgtagtcaattttactttgacaaagtttgtactaggtagttgaaagtttcactctcggaatcaaatttttagaataattacttattacgtgtattatttaagatgatttttttaaaaaaaaataattacacttttgatccctttaatttaacctatgtgtaattttagtcaaaatttactagcgtaaaatccggtgtgccttgcacggatattaagtttaaacttcatcatgtataattttttggctatcattttttatatttaattaaaaataataatttatattattaaagttatgataatttattccttcaaaaaagttttaataatttacatataattgtttattattgcaaatttctaatttatttatttatattataaagtgtataaaaataaagtaatagattactattaacaaaaaaagattgacatgctgtggcaaattgataataatttggtaagatattaaattattattatcaataaagatatcatgtatttttctttagctttttaagggcaatgatactggacatggagaataaaaattgaaaaaaaatactttttttcaaatttgaggatgtgattaagttgccttaaataaatatttatacaatgccaataaagtagtaataggagtggtcgatagttttgattcacaatttcttacattgaagtccttagaagacattgtgtggtaatgggtccttacaagaagttatttttttgtctcttaatatatatttatctttcttacaccaatttgtnnnnnnnnnnnnnnnnnnnnnnnnnnnnnnnnnnnnnnnnnnnnnnnnnnnnnnnnnnnnnnnnnnnnnnnnnnnnnnnnnnnnnnnnnnnnnnnnnnnnnnnnnnnnnnnnnnnnnnnnnnnnnnnnnnnnnnnnnnnnnnnnnnnnnnnnnnnnnnnnnnnnnnnnnnnnnnnnnnnnnnnnnnnnnnnnnnnnnnnnnnnnnnnnnnnnnnnnnnnnnnnnnnnnnnnnnnnnnnnnnnnnnnnnnnnnnnnnnnnnnnnnnnnnnnnnnnnnnnnnnnnnnnnnnnnnnnnnnnnnnnnnnnnnnnnnnnnnnnnnnnnnnnnnnnnnnnnnnnnnnnnnnnnnnnnnnnnnnnnnnnnnnnnnnnntagatgttattttttaaaaaaaattaatcatcaataaaattattaaataatttgtactaataagacaattacaataaaataaaataaaataaatcaactttgtttaaaagaaaataaaaaagaagaatgcaagacaatgttaaagtgaagaaaattctaagtagaacacaacaaaataataattttttgaaacatgtgtgcatgtcaaaatatatttaaatatttaatgacgtggctagtaaattacatgtattaaataattaaaatatattaaaaattcaaataatatataaaaaattctataaattataaaatgtgaatttaatatatttacaagacacaactggttttaaataattcatgcatcaagcgtatgctttcataaattttgtgactttgtttcataagaatatgttaatcacatttaaatgaaattagattttaaaaccaggcatcacacggatttctttaaatcatatattttatatatttgtgttcacgaacattattaaataataaatcaagtcagtgacgttgtgttgcgtttgtctttgtaaggataataaagacaaaactcaagtcagtcaagtcgaggcacaaaaactgccaaacacttttttccagtataatactcagagacagatgacctctgctgccacaggatcgtaaagttgagatcggttcaagaaacattttttaggttcaaataatctataaaatagatattttattttaatcttctaaagattttttatttaatcttaatttatgtatttttattttagtttacgttatacgcaataataatattcgcatctatttgtcacattattaaaaaattgataaaataatcacgtgtaaaacttttttttttataaatcatatttttaaaaatagattttaaaaaattatatatgattgtttgtcctattagactcgtgatgattgacgacaatttaataggctacctatatatttgttatatcatccattaatattatcacttaaaagcaagagctaaaactaaaattttaaattctacatagactaaaataagatcttagataggatttaaaaatcactaattataggatgaaaataacattaataaatatgggaagtaagataagtatttattttttaatactaaaaatatcttttgtgaataatatatcttattatgaaaatatgggattccaaagagtatatctctttaagaaaaggggcataaccggtattttaaatataaagaaggggaatcaggtgtcctgagcaataatggggagtgtaaatagcaagtgtcatattcttttttaagtggctagaaggttgcgtaatcgattcacgtcaggttcatttttattggaaaaataaaataatgtttaccctttttatttttactgcatattttttttttttataaacagcgataatataacaaagcagcaacgattacgatgcagaaaattattttttttttgaaagaatgcaaaaaaataatttgttactattatcatctaacactttctattgttaataattaatagaaaaagactaaataacacaaaacgatttagaaatcatcagattatttaacttaattttcattttaattattcatttaatttttaagatttatacaactaacatttactctactcgtcctctcattctattatgttaatagtagcgcaattgacgaatttatatataaatcatattttaatagtagtataattttatcattttttattttattcttctaactttttatttgaattttttttaataatttttatcaaggaatttgaacatttcactcaataataattctttcaaccattatcgtctaacataaacacaataataaaatcgacctgttttatttgtgatactcgtttaattttatcatccaaatgaaaaaaataaacataaacaaattttgaagagtgtgacaaattttggcaaaaaaaacgaaaataatacaaaaaaataaaaaattacaaaaatggggcagtttggaaactatttaccaatctgggacaactggtcacgcccagttctgggcgtgaccagtgtgtatatataccccccggattgcactgttcactcacttttcagcttttggcttctctctaaaagcttctctctgccttctctctaaaaagttctctgacttctctctagaagtgctctgggttctctctaaaagttcagaggcaccatctttcttcgattttcagcagcgaagctctgcgaacaagtaagttaatttgttttttaattctaattgatatttaatttattattttgttgattaaagtaagttaatttattgattattagttatatttaatatgttatgttgttgatttttaaaattgttagatgcatatgatttattttattttgtagaaaactgttagatgctaggtgatatgatttagactagtttagggttatgatttagtattaagttaagagttattgatttatggttaagatattgatttagtgttaggtttagagttagaacccttttgtcgaatcatgccctaaaccctaaaccttaatccgtaaaccctaaaccataaaccctaaaccctaaaccttaacccgtaaaccataaatcctaaatcgtaactttattaaatcctgaagtagattgtcattaaattttaataattttaggtttagaagattatagaaaatcgcgaaccctaaagaatagtgtttagaatggtttagaaagcggcttcatttggtgtgcatatcaagaatctccgagtctttagaattgcaatgaaaatggcatgtgggtatgggataatcacaattttgatggtgaattagaaccctttggccattgcttgagagtctcagagttcgtgggtaaggagtgtatacaacagtactccccaaatcgtgttgttatgcaattccgaatagatcaggacattcctggtatgctagcacattacaatgagaatccttggataagttatagtcagccagtgatggatacaaatttgtataactattggtaacttgcaaatacaaatttgtatccattattggctgactataacttatccaaggattctcattgtaatgtgctagcataccaggaatgtcgtgatccattcggaattgcataagaacacaatgtgacgggtactgttgtatacactccttacccacgaactctgagactctcaagcagcgaccaaagggttctaattcaccatcaaaattgtgattatcccatacccacatgccattttcattgcaattctaaagactcggagattcctgatatgcacaccaaatgaagccgctttctaaaccattctaaacactattctttagggttcgcgattttttataatcttctaaacctaaaattattaaaatttaatgacaatctacttcaggattaaataaagttacgatttactggttacgtacaacaatttatgtttttgagatttatttttcattttttaaaaatttatttaaatccttcagtttaggtgaattataatacaaccgtataatttaactacaatacatcgatttattaactataaaatagtctcataggtggctgattcatcatcttcggcatcttcacggtctggatcggatgacgagggtcagacattggattcgacgacccatgttgtgcctaccccatataaatggggggttttgcggaggcgtatccagagatgtcacgttttacaggctgtgtggaacggggacaaagatcgtgtgttaaagacgcgacgtggtaagatatcagggggcccaaactgtgacgatattcctgcaatcgttttggtcatgttagggcaggcaagattcttacatgtcgcacgcatgcgacatattcaggtataaattttgtaatcggataattgtacatacaaattaattcctataaatgtattttatttatatgtttttgaaactttacttcatatcgatcctccacttatcagtgctttggttgagcggtggagacctgagacacatacctttcacaagccatagggcgagatgaccatcacgttggaagacgtggctggtatattaggtttaggcagtgaggtcaaatcatcaccggatctacgtgtaatatcactaaatttaattaaggtaatttgggtgatatttgcgtaattaatcggatttacgaaagggcagttcggtctttttcggaggtacgggtgcagctagtaattgctgaacgcacccctgtttcttgttaaaaagaggcagatcacgttttctgcttgtttcttcttctcttttcttcttttctggtttctcctcaatcccaagctctcttcttgccatttccacttggttagtggccgaaatcctaaaacaagcaaggaagaaagcctttttccttgttctttgttgcttttgagctttgggtgttggtgatttgaagaaaagagtgagttttgaatctgtccattttcgttcggcgtcgcagaaccgcgattggaagccatagagtgctggtctaccctcctttgtggtgtattgaactctaaggtttgaaatctcctcctatttctccttgatttttgaggttagggttagggttttgagtgagattgatgaatgttgagtttaagagggtgagacagttttgaagtatgatttggagtgtgtagaagttggttttaagttgaaatggtgtttcatgcataaatcatgcaagcttgttcatgacagtcaagaacacctatttgggcagttctggtgttttgcccatagcaggagctatcggtgtccaaatggtctaaaactagtgccatttgaaagctaagagagttaggtttgctctggaattttcgtgatatttttagagactcctagaaattgtggtgcagagttataacaggctgttatactctgtttttagcagatttttctgctgcagagggccattttgcagaaatcataactctgtctaggatgatccaaaacgagtgctttcagtggctatagaaagatgggtatgtgaaattcattcctgtaaaatatcagatcatttggacgagtaacctggtgcgggttgtcctcgaaagatggctggttgagttggtctgttgctgtcagcactatttttagtgcgtgacagttctggtttttagtttgttgaagaggctgtggttcatggtttttgatgaaaccagttttttttaaaaggtaagagataaatcttgatgcctctaaatttttgtgattttaggagcttcccacaaggatttatgatttttccaagtgggtgtaaaatctgcagaattttatgcagcagtttatgcttttctgtatgttttgccagagatatatgctttgtacggatagaatggtgtttgatatgtgattgtatgccttgttagggcgtgacaccgagggtgtcggtggcgggtgccacagagtagggaaagaactacagagctcggctttgccaggtaagttcttggtcccttgggatgtttcccacttgctgtgttccaccacactccgagggagtgatggttgcattcatgatgcattcattgatggttgttgcatcctcataatgatatgtatgcttgtatctatgcttgaaattatatgatacctgttgatagatcttctggccagttagatagatatggacctccctaggagatgggtttcctcctagtttggtttgctcatggttgatgagatcccagggtgatgatgatccctcaagaccaagagataggtgtgtcccgtcgtggttgattgcctattctcgaaggtaccatatacgtgcgtctatgcgtaaggggtagctcccgatgggatggcacgggtgtgagttccggtctcacactgaggttggcgttgatgagatccgccgtacatagagcaagatgacttgctagtattgttatgagggccgggaggccgggccgggtggccagtatgtttgtgatgccttgatgacgtgtgtcatgggaagtgagccagggtggaggagatgcctccaaggaccctgagcttactgagatgtttatctcaccccgtgtgggacttatgtggtttcaggtgatgcttctggcaaagaggagcggtctcagggcgggaggccccagtagagacggtacctgcttggctatgtgcagcagagagagagctggatggctcagcttttgttgatgtttgtacccctgtagagggaagatgagtggtgcactcatgtgttcttttgtatatgttatgtatgccctcgtgtgaggaaggatctttgagatcaaggcgatgtatgcctattcttttgtatagacacttcgagtgtcagatgatgtatttgtacataaccagtttatgttatgtgatgatgtttcctcctgtttatatctgttgagatatttgtgtttatctgcctatggttttgttattctggattagcaggggcttgtattgttttgtgttgagattatatgttccatacataatataatcaagaaatatggttttcggttatgcttccgcaaaggttttaattaatgttttaagcgctattctgataaataataatgttaatacaccggaggcctacggggtgttacactacgtctgacgactggcccagcatcatcgaggaggtatttggtcatcatgctctggagtctgaggttagaggatgattactgcggctgtcctactttgataggaattacgcgcggtgggacgaggtgggaggggaattggtcgaagtcgtaaggtttttgaaggctcacatcgcgcgcatcattggagcatggcttctatgcgacagatccggcggaagcactatcggttgtcgctatgtccctttgctagcaggggacatgactgatatagccaggtatagctggggatctgcggtcctcgcacatttgttcagacaaatgtgcaagtgtacagatccggataggagtgacatcggtgagtgtcacgtgctactgcagatatgggcgtggctcagatttccacccattgctccagctatacctcagcctactcatcaggagtggcattacggccataggtatgcgttcttattttcttttattaattaccttccacctatttcttttattaatgtcatttatttaaaatttaggtttaatgctttagagaggtatattccacacaaccttccgtggtatcgggttacgttagattcccttgctcgggatgaggtacgtgatgttatttgcttaagttttggataatttgcatttgtggtaatcattgttcttttgtaattgtgtgtttaactgttttgttcaggtcgtatggcaaccgtatgcaggatatcatttccttggtgctactgagcatgagcgactgttgtggatgacaactacgccagtgatatgcttccacacagttgaatactctcaccctgaccgatgcatgcgacagtttggaagggatcagcccatccctggaagtccaaggaagttgacaagcgtgcatgacctatccctgcgagggaaacagatggataattggagccgtaagctccgaccctttattcgtcgttgggatcgtagggaccagcacatagagctgcccccccaactgactgggttcatgtcaccaaaccatgagtacatggcttggtacagggagaacgggaaacgatacatcactaagatggctgcgaagatgggtcgtggtgtaagtgttatttaaatataatttgtaaactaattttcattatgatgtcgttattgtctagactaatcaatttgttgtgtaatttgtagcttgatggactggagatgatgtattgtgacagtggcaggcaggagtggcctgggttcagcatggactacctgcatgaggagcttggtcgcattatggccatgtttcgacagagctgtaggttggaggagccaggcccaactgcacccccatcacagcttccagatgaagatgacccgtatgtggatgttcctagtcatcgtcgtgagggacacggactggagcgtcaccggaaagttaggcgacaagttcctgagattatacccgctcctaggcctcgccctgatggttgctataggcctccagtgataggacccacgtacggcagtcagactttctattaccagtcttctcagcagccggatatgggctatcaggggttcagtacgcagagcaacatgccaccatggtcagagtacgggtcacagcatgtctattacgccccaactttggccacgacatcaatggactgtgggactagttctgccattcctgctacggagtggactgatgaggacattcagaggctggttgattttagtctggatagtcatggagattggtcagcacatggagaatacgacaccccaattcctgatcatcctgacacagcatcacaggatccgatgactgcatgcccaccagtatatgcagcccatcctcagccagccccctccgatgcagggccttcccaggcagcgccttctcagtcatcacatcctcaggctgtgcatcctcaggcaggatcttctcgacgacgtgttagacgggtgaatcccgatcgtcaagcgtgtcatcatcagtggtcacctgagtcgtagtgtttatatggatttacatttgtgtttatttattttttgtttcttgtaatgtactgtatttgtaatggataaatttattttttttggttatgaactttatttgtaattcaaaaatttataacagttttatgcactttatgcaccaatttgtttttggttaacttaaaatgtagtataaggatcgtcattacaaattgaacacgcccaacaaatggaggcgtcactgcacacactcaaatagggcgtgatcggacacgcccaacaaatggaggcatcactgaagacgcctacatttgggcgtcattgaaccttatataaggctgaccatccaacacaaattgcatcgactactccctcaatctgaatacttgcctccgtaactctgagattgttttactatggcattcttagcagaaacaagcagccaaaccattgataactcaaaattagccttcatttatccaaatggatcgatgaaacacaacgaaagcagtgtttcttttgaatgtacctctccaataccaatgcgggttcccgatcagtgttcttttgaaacactgaagcgtaggatgagcgacacccttatgataagcggcgaccagtttgttgatgaaatctactacagacagccaaacctacatccaggtgagcaatgtttttttcattcttttcaacttacaaatgataacgatgtttgcgtaatgttgatgtgcaatgaacaactgtcgagcattgggcctatagaaatattatgcaccataagaagaacgcctgagggtatactcaacctgcttcaatccaccatggtcccaacacatgatgcaatgctatattacaacggcaagtggaacataccacgacaaggcggttttgtgggctatgcattcacgggaacaaatccaatcagatttgacattccttcaggctgcaacattgaaacactgaacaatctaatcaagcaagttgcgcctgttggacttcccccttatggaatccacaagtcacaggtggttagaaaaaatttttttagacagccacagcatcacgcttattcagacaacacaatcgagtatcacatcaaagagttgcagtgcgatgaagacatcttgaaggtgttagctgaatccaactactggaaacgtttttctccaatacaaatcttagctgtttttagcaaacccgtacccgaattggaatgacgcatatgtgctacaccttacatgtgaaactatgaatttgtgttgttattttcttaattaacgttgttgttttcttaattaatgttaaccgtgttctgtaaccattgtgttatgcgaattaatgaagatcatgaaatggtaaacatagtctgaaacataatgtcatcccctaaaatacaaaacattttaatacaggtaatgttacaaacattttaatccaactactgaaatcatgaaacaccaggacgatgaggacaagctctccgattatgtccaacagccttgcaaattccacatctggtgcgtctttgactggtttcgacttcgtccatttcgttgcaaattctggtcgcctttggacgaccctttccacgcaacatttctctgttgggtatgataactggaccgtcagtcggtggaatggcaccttcatgaccaattggctgccatgggattgaataagcctgcaccaaattacttatgaggaacacatcgtcgacatactgaaaaggattctgtcgaacatgtaaagcagctgctgcggcgtgactgcatgggtatctgaaggccttaaacttgccacattgacaaaaccgctgtccaaggttgactgaatatgacctctcacagccatcctccacctcaaattgtgttcgctcaagattataagtgcgtacgtggtggcctgtagcaacggtctggttatgcctcatagcatcaaccacatttctgcaatggcgcattgaagcctcaacttgtgaaatagccgcctgacccctcgttacaaaatattcaaccaatctgttgtacgtgtgtttcaccaaagcagttataggcatgttccttgctcccttcaacacccggttgactgattcagacaagtttgtcatcatatggccaaatctcctcccctctacatcacatgcacgtgtctactgttccttggggatgctatcaatccattctacaacctcagggatgctatcacgaaatcgtgctaacgccacctcaaaatcaaccatacagggattataacctacaaaacaatcgtcccattaacactaatcaacttacacatgaaacattttaatatcgtgtcataattgttaaccatacctaaattcatcagtgtcttcttcaagcgttgatttctgaacttttgattaaaattactggcaatatgacggaggcaaaacacatgatgagcatgagggggttgccaaccagcatgattcgccacagcagatagtatgctgcggtgcctatctgaaatgagacaaatgttttgcctctgagtaacgtgaaaacgtatgttagccagaaagtatgaccaagcttccaaggtctcccctcgactatggcaaatgccagtggcaggcattcgttgttgtcatcctgggttgtggcaatcaacaatttccccgtatacttcccatacaaatgagtgtcatcaatctgaatgattggtttgcagaaattaaatgcctggcaacactgtccaaacgtccagaacatgcgatgaaacacacgctttcccagtaccaggcgatttgccacaaaataatcattggtttgaatatcataaaaagcacctggtgaaaaacgaagcatatagccacatcacatgggcaaaagtgcatatgattcttcccaattcccgtaaaccattgccattgctttctgcttcgcgaaccaggccttacgatatgaaattctgaatccaaatgtatgggtgatcctttcccgaaccaatgcaatcgacatagacggttcctccttgatcattcctaacaatgcaaaagtaacattcacattaaatttaaccattattcaacacatacagaggaaatcttaaacacacatacctactacaattgaagcaataatatcagcatcaagctgtctatgaccctgtgaaatatggtcgttaaggcagttgtgattgccgccccatctcgaaacaatccacttctcaccgaacgccggtttagttaccctaaccctccaggggcaaccctctttatgagcaatacacttcatgctaaacttgctaggcttgctctcaaccacataagcctcttgatgctccttcatcaggtttcgcttacatacgatttgtgcatcctttttggaggaaaattcttgtttaacaaacaacggatcccctaattgccatggaccctgcactgaaccggaaccggaaccggtaaacgattcttcttcgcttggatgactccaatcaatatatgtgtagtgaggaactccatcccaaaaaggagtcacctcagcaccttcaaaaacaaatgtggtagaataaatatatcatgcacacaaaaatattaaaacatacaaatacacaaagtttacatgacttcataattaattttacaaatgttacataccttcaacaggatgttctgattgtgaacatcctacgtcgggatgatgatgcattccagacgaccccacatcagtgtctgcttggaatccagtcgcatcaacactagcatcgtcatcattatccgacgcactagcatcctcttcaagaagacgatcctccattgtaatgttttcatcatcgtcatcctcttcatcgtcatccataacccaagttgggtcatgtgaatcttcttcagacacgtttacaactggatcagcatatgacgatgtaggctttgcagcatttacaggaactgacataatgggtaacacatcatcaaccacaccaaagtccacgtatagctctataaaatctctcgttgccagtttaaaaaactcttcaattagcaattctaggtcttcgtcgtccacaacttgaaaacccatgtaatgttcacgctgccataatctccctgtaagctgtatgatactttggttgtcttgaagagctaatttttgtcgaatcttctgatgtaaatcacccattgtcgagcttcgcttcaaacgtgtctgccgtttctccccttcaaaaacaacaccttctctcccttcaaatttccttccactataatataacacaacacgtacaaactcgtcaccacctgaactcatttcttccactcaacaaaaacaaacacttcttcgcagaggttcgctgtacacataaatttcaaaaaactgttagaatatcttcttaaactctaaaccctaacccctataccctaaggcgtataaatcctaaaccctaaaccctaacccattaaaccatcaatcctaacccttattcaaaaaccctaatcttttaaccctaatatgtgcaccctcatctataaaccctaacccctacactctaaaccctaaacactaaatcataaaccgtaaaccctaaacgtgtaccctaaaacttaaccagtctaccctaaaccctaaatgtttaccctaaaccctaaacgtctaccctaaaccctaaacgtgtaccctaaaccctaaccaatctaccctaacctaaactaagctatacaccataagaaacattttctacaacactaaacaatatattaactcgtatacacaattaatcaaataacttacttgtgttggcagagcttcgctgcaaaatcactcactacacttctgtaactcgagtcaataatgcgcaacagtcagaaatgcagggaaaactgaaaatgggagggatatatacaccctggtcacgcccagaactgggcatgactggtcacgcccagaaccaggcgtgattacccccctagtcatgcctggttttgggcgtgaccagtcatgcccagttctgggcgtgaccagttgccccagattggtaaatagtttccaaactgccccatttttgtaattttttatttttttgtattattttcattttttgccgacaaattttatttgaattttattttttatatttaactaacactataaatttatcttgaatgttattgttttaatttattgaacatgaacaataaagtaatatttattaagaataagctaaaaatatgcaaaatcacaacaatataatgtctgagtttaaaaaatagacatagccaaaagtgtaaaaaacaattctataagatatttaatttgtcgcaaatttaagttacttataaaatttaattgggtcataaaacattttgtaagagaataaattatgtaagagtaagaatatcattgtcttatttttattttttatgggagaaatcgagaaactagtaatgctatcaaaacgagttcaaacatgtaggccaatctgatccaccatagattcagatcaagttaagtcaacaaagttgatgaatttcacaattggttcaaaatatgaatctgacccacctaagacctcgcgcactcaggttgaacccgtggtgggctaggtagactcaccaacccacctgagtaactctaattctaatttactaattgaacaacacaacacaagttacaacaaacgcaacatctcatcaagacatcgacccacttagccactctttgcctcaagcgcctctcgatctctctccgtcgacgacttgatgcttcagtgctctcactacttagtcctcacatacgtcggcctcgactcgacccacttacacactcccctccgtcacgacaactcgagctcgacacttcatgcggtcatgcctcgatctactctccatcggagtcgagacttgagacccactctcgaccattttttcaagactaaactttaagtgggccgagttgggttaacccatttataggatgggccgaggtgagctgcacccaaacaaccagggctagcctgtttgacagttctacgaggaagtgaacgtatgtggataagattacgagaaacactaagagatgtttggtaaaggaatttctttctttttaatgtttagaaatcacgattcttaggtatcatattttttggaattaataaaatatttttgattggtattggaaatattttaataatttttcttgatataaaaacttacgttgtattttatcggtattttaattatttatcatactaaatgagtaacataatatttctcctataatcaaaaattaaactttgaaaaataagatttacacattcacacatgaattattttttttgaaaaactagttaaaaaatattctcagaaatcatctttttccagaaatattattttaaaatgagcaccaaaagtgagaaactacctaaccaagaattcccgaaaaatttaaaaaaattccattaccaaactcatatttggatccgttaaaaacgcgttaaagtgaaaaaacacacattcggtgacacccgtattatgcttgagaaaacggtaaacagtttcgcaaacacatagtaggaaacaatttttatgaaaattatatatatactatttggtgtgatttctatagtttttccataatatgtgatttataaaataaaacaaactaaatgattaaattggatctgtggcgcaatggtagcgcgtctgactccagatcaaaaggttgcgtgtttgattcacgtcaggttcattttttaattatttttactattttgtttattgccgtttttttattatttaaaaaacggtgatgaactgatttattatttaaaaaacggtgataaactgataataataataataataaacaaaaacaaagcagcaacagttacaatctctgaacactacacggctggcgctgcaacctttgtcggatgcagaaaattaatttgttagtactataaaaataccaattagcacaaaacgaatttttcaaaaaatacatataatgacgttattttaggctaaaatatatatcttttttaaatctttaaataaatcttagtattttaaaaaattggtctcgtactattaactaggaaatatccgttgggacaatctgtctaaccctgttacccatcaagttaacccacctcacctagggtcccactatttaagacgtgtgcaaaattgtttatcatttctcagcgaatacaatgtaaaatttaatcatttcttaagaatggttgaattatttatagatgaatttattttttgtctatgaagtcatttatttcaatactattcatgacttctaataagcaatgcttacattgatttaagaatattatttaagtttcagaacttttagttttcgtaaatataccaattaaaattgaagtaattcaaaagtgggtgaatgtgctttgtgaatgattaactacaataactttcaagtacttctaacaaatcttgagattccactcattgaaacatactttttatggttagctaaaaattattaaaattcacaaaaataatataaatagtacttataatttattaaatctcatttataatttcataatattgtattcattttactgttttagattttctcacacgaaattaaagcacttctggtctgaaaaaaataacattttaaaaagtttttagtggtgggcttgtttaagtttctaaaaagattaaaatctaaaaaaaaaaaatcttattatttgaaaaatcattttgagtagctgctaaaaaatcttaaattacaataataattttttatttatttaaaaattataaaatattctctctgattctttatataagaaacaaatagctcataaaaaatataagaaataaatagctaattcatcaagacttataaaaatagacaagttagttagttaataatatcataatagttaataatatcataaatttaaatcttgttccaaaaatacccataacaaaaagtggcactaatatttaatgacactactcataattcatgggatgatattctttcaaccatgcctatattgtaataggtcaataaatgcatccacttgcatggagaatgaatgacaattaatctttcacaataaatgaacaagcaatacatcttaaagtttgtccatgtttcttataattaggaccaaaacaatactagtatactcatttgtttcatataaaaagactgaaattaaaagagtataaattaatatttaatcttcaaatacactactcttttgaatatcttaattgaaaaccctaaatgataatcaataatgcaaaaacatgttgaaaaaagtgttttcatttatctagttgagtctttatatatactcatgcctactacgatagactacatttggtaatagctagatagtgtacgtgaaagttctaactagcgaacaagcaaagtagcaagtacctacaaataaacattgatcgtcaaatttgtatatgaatcaacaatgtaattaacgatatatgttacttgtccttttacctactatatgtttttctaaggtcttgcccaacctttatacaagtttaagggtgaaaaagagtaaggataacttgtaggatcaatttgacaatatatcgaataaatcgtcaagttgatcaatgttgcctaacctacgaatacttaaggcatattcaaaagtattcaacatttctaattcccttaaaaaaaaagaccttttcaattaatttatactctttaagaaatttggttaattaatttaataatgacattaaatttatcaataatttataatttttttttttaaaaattatcctttatttttattttaaaaattaatcatatatctctttcacttaattgcttttcacttactcactttcttcaatcctaataacgagagaaaggttttatctcattaatttcaacatttattagtttttggctaaaactattattaattaattaagggtgtactctatgaaaaaaagttaatacaaaaaataattaaaaattattttataaaaaggaatataccattttctaaaaatagtcttatagaaaagggagatgaaaataattgatgaaaatatatcaattaaaaatgaaaaggaagaaaaacaatatatgcatactatcaacaaagacagcgaaaaagcacactggcagatggacggtaacctatgggactacgctggctaactatgcattccacaccaaatacgcaaagtggtttgtatttgtataaaatgcatgccctaaaactcaacattgtttggtcatttgtgaagcgcatgcaaagaaaagtaacacaattccaaaaatagcagtaaaagataacgtatctgggttgcaaatgaatagttaggtttcacacattttgaccctgccgtcatgatttttagtggctgaaatttttttttctttatgtttcattaattttgtaaaattgaaaaatataattaaaggttgagaatcaagtttctttctttctctgaccacagcttggaaagcctgtaaaaaaatcaccgaagtcttaggtacagcttggcggtggcggctatgtttcatgctacgtaccacgaaggagcatagagcactatagtacaaatccggaaaaaaaagaattagaaaaatatgggtcaatgacatgaatgtattttgaaaatatttgtgaaaattaataaataaaatatttgtgaaaacaaaagttaagaaaaacaatcaactatcttgttacacggcacaactttattctaaagagtaaagtatatataattagtatcccataaaatattttaaaactttattttagactttatgaaaagtttgtaattagtttttaaccacatatatagactaagaacgtgtttctatcttaatgtaagaattaaaataaactatatttttataaggattaatatcaatattttaaaggctaaaacatattttattctaattaaattataaattcaaaagtataagaaaatataactaattaattttaaataagtcagtaaaattatgcattatgtatcattaatatttatttctattttacttttattttataaattattttaaaatttaaaacatatttaaattttcataccttttcaccaattcaaaccaacttatttttgtgatcagattagtttggattatttttttttaaaaccaaactacacaaatccaacctaatacaattcatgaacaaccctaaagaaataacgcgtcaaaattacaattcatttaagtatatattatccattcaacattgataaaacatgagaatctttaaaacatactttcaaacatattctcttattaattaaaatttattaaaaactataaaaaaaattatgtgaaaagaaatgtccctaacattcttcgaaaagtcgaaaactagattcaaatacaaaattatgcaatttgtacaaaaaaagtctaaaatatgcttgccatttccaagtacagttaaaaagatcttcaaaaatacaaatgggacacatgttcgatgcaaaactaaaaagggcccacacgttctggaaagcggaaacccaaatttgcatgtgcgagcttgctaaagttttatagtccattcaaaagttcagcatatgtccaaactcacccaaaaatatatgcctcgaatcttcgctctaattcgttttcatgacgcatgcaaaattcgtggtatatattaacacaccctcccatgccataaaattctaatagaaacattttaccaaactcaattctattcaattgtgaatggcaacaaccactagattattgttgcgttcctctaagccaattcaacttgctccttctccttcttcttcttctaattctttgtacatgaaatgtgtacggtaccaaagtagggctagtttgaatgaaaatcatcataacataggttctgtgaagggagaaagaaaaccagtggtggctgtgaaggcaactatcgctaccgccaaccacacaaccacgtcacaaccagtgattcaacaaggtttgtcagacttagctactttgctagcaagtattcgcaatgctgttttggtttttttgagggcttttgtcaaaaggaagccacgcaatttaagaccacagatgctcattgaaaaggtacgtgtatatatacttgtataattttgtctattatttttttctttttacagtacttgtactcactttcaccactactaaatttactgattaaaacttttcacaacaatttgatatatgaacatttctttttggaaatctcaagtcaagtgatggtatagctaaattaatgtatatataaataggaggacaactatatattaataagattgagtttagtaaaagtgattagtctctcgtaatatgataaatcaaggttaaaatctcggttaggagatatgtctatatttagtattttccatgcctcgtgggaaaccaaaataaagtagggggacaacactcaatataatatgattttataagattgagttaagatataacttatattctaagataatattagaacttatttcaatgattattgttagatttatcggatcatctgtgttattattagactctatccacaaatgtctcgtaaattttatgcttgagatgtctaatccaattttgtaagaggaaattttgtgaactttagtccctcgtgttatcatagaccacaatccaaaaccaaaatgatgtattgtggttttaatataaaggcaacaacattgttaattaattagttataacttataatctatggtcatgcatgacacattttctgtgttaaagtccaattagaattaatttctgttagacatactcatgtagcatatatatgcgtaaatggtgatcgagttaaatgacgattattttatgcaggcaataatcgattgcagattttttacgttgttcgcagttgcaggatctttaattggttcggtgttgtgttttgttgaggtatttatgaagctttgtctactgttttcctttcccttatgtttttgttattataaagacaagaaagaaaacttttatataaacagaatgtgttgcttcgtaaatgcagggttgccttctagttatcgaatcatacgcgcattatttccatatgttatctcaaaggttggatcaaggacatcttgtgcatctactcatcgaagccataggtatgtctactatagtgaacttgtccataaataataaaaaattattatactaattatacaactcttatatatatatatatatatatatatatatatatatatatatatatatatatatatannnnnnnnnntttttatcaaactaaatagttttgaaaactatttaccaaatatggatgattttaacttttgcagaaaaatctaaaaaatgacttttacatcaattataatcataattgatgtagaaaaatctaaaaaaatgacttttacattgttttgccatcaacttgatggtgaaatgcataaaatcgaaaatttggatgataacttttgtgaaatgttaaaagttggatggtaaaattggtgaaaaaaatttaatgataaaattcgtaaaattatgaaagttagatggtaaaattcacaaaaataaaacttgagtagtaaaattcgtaaaataatgaaagtttaatgataaaatttataattaagcttttgtcttaattaaatgcatatttgatttacggttaaaattattgtgaagcacatttcaatacaaatccaactaataaaaacaaaatnnnnnnnnnntatatatatatatatatatatatatatatatatatatatatatatatatatataaacactttccatgacatgagaaataatagatttggtgtagtgtagtagtaagaatttcatgcatttacgcaaataacaaactagaatttagaactgtaagataaatatcagatgactcaatttcaagtattgtgttttaaattcgatttgtcaagattaaaaattaatcatccactaatttaatggttctgattagtttactttagctgtctgaatgtgtaaatttattgatttttgcagctaacctaaatctttctgtgttgtacaagaaaatatgcaaatttattgtatgaattacaatttctctgtaataattaatttcttctaccttcttgttattgcatgttctgctatgataaagttaattgaaaatgttctatcattttttcgtgcagactcgtttctgatgggtactgccttgctcatttttggggtcggtatttacgtcatgtttgtggggtcaagcactaccagtaaagaaacacaaccacagctttgtggatcaaacttgctcggtctcttttatatgaaggtatagcatatatccatgcatttttgaattgtctcttgtcaggttatataatgttaatagtgtaaaatagttttattttgtcatttcattataaattattatgtataataaatttattaattttaaaatacaaacaacaataatttatgattaattgaaatagtatacctaaaattattttatagagttagtgtgtgactgttaatataaactctaataaaaaaaaaggttatacactgataacagttttatatcatcatttaattacaaatattatgtatgataaatttgttcatttttataataattttgtaagtatataaaacataacttaaatttacacattaatgattgtttgtgtaatcaaatttttcagtcaccccctcgatgggtagggatgcaatcaatggcacaggcaaagtccaagattgggcatgcagtgatgatgattcttcaggtgggactgttagacaagttcaaagacattcccttagtcacatgccttgatcttgcttgcttcgctgctgctgtactcacatcctcagcatgcatttttgtcctctctaaactcgatcactagtactaatgtaaagtggaattagtgtttcgacttcgtatttttgccatattttttttatagaaataattaagcaattctttcgtaggccaaaagaaaaataaaatgcttctgtccctttacgatatggagctcaatcattgattatacatatatttctcttaattagtttattgagaatgatatgaaataattccattttctggtttcttacttcccttttcttttgttgtttgtttgtaattgtaatgactactcggaatgaatacatatacatatataaaatataaataagtgcaggttactgagttttacatttacaattacgtacaacacagggtagcagtgagcgtaaatattttaaatattttttattaactattaatttgctatttcgttaaaggtattatttttttatttctaacctaataattatattatttgtttaataatttaataataaaaacaaaagaaactaaataatatatgtagataacgtaaaaaatacgtagataaattttttttacagtagatacatttttgtttaataacataaaataacggttacgagaatccagctttaagaatatttgttaaaaataattaatacattacattaaaccttttttaaaaagttactaccaaaagaatatttttttaataaattttaaaaataaatagtttatttttttaatataatagtaaggaattagatggaaaaaaaaagagatgaaaataatccttaaaattgtggggaaaaacatcaattagattcagtatcatatcctaatgctttcaccaaatatatatactaatgtacatttactgttaaactagacgattcttcaaggtatcctagacttggtgatccatcatcacaactgcacaagaataacatgattttcaatagcatcaagtaaaaaatcttgagttcgttatttgtgaacattgaagacttaagggggtgcaattaagtaaggtattgaacgaccttcttttccttgctcttgtcttttagggtaagtagagacaagacagttagaggccaactttatttaacataagatcgtatataatggcttgtccgaatgttctctccaaaggacatttctcttggtcccttgatccaaaattaacttgccccacaccacttcttgatattctcttcagacacttcctcatctacaaaaggcaatttttttttctttttcttttaacctattttgtctatcctggcccaaaaatcgtccaaattaaaggctatactgtgaaagatgtctatcctgaccttctttttctttttcttttaacctattttgtctatcctggcccaaaaatcgtccaaattaaagacaacatcccaagtcccccaaattcaaatgtggtgaagaagtactttgcataacaatacataactgaaacagcttaattgcaattgcaattgcagtttgactttgttgtgcattttgtccccatatatttatttattttgacaaatttgccccgaagtttcaaaaaattgcaaattttgaccttcgttcctccaattgtccgctaaattgtttattgttttcctcactctttgtatcaaattttcacaatgttacacatttttcttcatatttttgacaatgttacacatttagctttcatatattttcacaatattgcaaattttacctaaatatcttcatggtcaactaacgaatttaatagacaattggcgaaaggttaacatttgtcacttttttttttaaaaaaaaaaactttgagagcaaaattcacgaaaaaaaaaagtgaggatgaaatttgtatcaaagataaactttgacacaaaaaatgcattgaaggcaaaccgaaatcataagtagaacctaagagtaagagtaaggcaagacaaataaaaaagcttgctaggttaataattcaatgaagtggtctaagcaaaagttgattgatcgaaagttcggaaaggtagtatacgcaatttgtggtttacattctcatattaatgtcattttacttgttttcactttgtattaagcaaaaaaaggaatttattaggagtaccaatggtactcagaataacaaggaagtaaggttgctctctcggtgaagtctctggtgggccatttgagcaaatggtctagccgtggacaagtaaattgacctggtataataggtaaacactgtaagtaaatcggtaacgaacattgtattttgaaattttttaaaattgccaagtgctcttttttaaaatatatgtaatacttatgtttggttcaaaataaggtctatagaactgagtgaacagctgtgtctgcttgtgttgggacctccagcatctccaccaactcctccttcaaaggatgaaaggcatattagatctcagcaagttcaacatgaatggtgatttctggaaagttgtttcgaaattgtattgtttgtgcatttgtcgtcttcaattcgtacattaaataaacaattccattcgacaataaaatttccataaaatttttttttaaggcaaaaagaatgtatttattaaagaaaacctaattttagcacaagaagtgcataaaccaagccagagtacaaaaactgccgcttaaaaagtgagtaaacaaagaaaatggtcaatatgtaagaaaatgtatacatgaagtacagacttctcatgaagcttcctatcttagcatatttctgcacttcaaaccattcaatgttgtaagaatttccgtatcagggaaatgtatataatcaaagccattattaaccaaaacaaaacgcaatccaaatcaatattccttttaatatatagtctgcttgtgacgattaagatacgaatcatcttcaaaaaaattaagcatgtggtagctacaaattaacttgtgtgtccaccatctgttcgagcatattctcctactggttgttgatataaaaacttgctccttacctttatcttttctataaactccattggatttaaaatccaatctgataaagaatgtgagaacttaacggcaaccatgacccattcccacgtcagaatttgaattttctctaacatttcttgattcttctctattcctccttcagagtctgaaaaaatcaaaatctacctagacctccagagcacccaaattactttataccaaactaaacaccaaagtgttgaacatacacaataaaacgacttcttgtgtcatggccgcatgaaacttctaccattgcgctcacacccttcattccaataaactgcatacaacgggtgacaggttcacctccaccaatgacaaagacgtgcacgttaccactcttgattattattattattatcgacttcgccagatcgcgttaccgtggtactccgttagggtttcaattaccctaatctttcaaataaaaaatttgcaaattaacctcaagcgatgcttttatccatggactaactcgcaaaactcaaaacatttttgtaataagtcaccagtatttgattttgtgcgtacaatatttaattaatttatctgacactgatctcctttcatgatgcttacaagatgatccaccacagaatttacgtgctgtcacttactcactttcacttacttttttttttttttttnnnnnnnnnnnnnnnnnnnnnnnnnnnnnnnnnnnnnnnnnnnnnnnnnnnnnnnnnnnnnnnnnnnnnnnnnnnnnnnnnnnnnnnnnnnnnnnnnnnnnnnnnnnnnnnnnnnnnnnnnnnnnnnnnnnnnnnnnnnnnnnnnnnnnnnnnnnnnnnnnnnnnnnnnnnnnnnnnnnnnnnnnnnnnnnnnnnnnnnnnnnnnnnnnnnnnnnnnnnnnnnnnnnnnnnnnnnnnnnnnnnnnnnnnnnnnnnnnnnnnnnnnnnnnnnnnnnnnnnnnnnnnnnnnnnnnnnnnnnnnnnnnnnnnnnnnnnnnnnnnnnnnnnnnnnnnnnnnnnnnnnnnnnnnnnnnnnnnnnnnnnnnnnnnnnnnnnnnnnnnnnnnnnnnnnnnnnnnnnnnnnnnnnnnnnnnatatatatatatatatatatatatatatatatatatatatatatatatatatataaacactttccatgacatgagaaataatagatttggtgtagtgtagtagtaagaatttcatgcatttacgcaaataacaaactagaatttagaactgtaagataaatatcagatgactcaatttcaagtattgtgttttaaattcgatttgtcaagattaaaaattaatcatccactaatttaatggttctgattagtttactttagctgtctgaatgtgtaaatttattgatttttgcagctaacctaaatctttctgtgttgtacaagaaaatatnnnnnnnnnnnnnnnnnnnnnnnnnnnnnnnnnnnnnnnnnnnnnnnnnnnnnnnnnnnnnnnnnnnnnnnnnnnnnnnnnnnnnnnnnnnnnnnnnnnnnnnnnnnnnnnnnnnnnnnnnnnnnnnnnnnnnnnnnnnnnnnnnnnnnnnnnnnnnnnnnnnnnnnnnnnnnnnnnnnnnnnnnnnnnnnnnnnnnnnnnnnnnnnnnnnnnnnnnnnnnnnnnnnnnnnnnnnnnnnnnnnnnnnnnnnnnnnnnnnnnnnnnnnnnnnnnnnnnnnnnnnnnnnnnnnnnnnnnnnnnnnnnnnnnnnnnnnnnnnnnnnnnnnnnnnnnnnnnnnnnnnnnnnnnnnnnnnnnnnnnnnnnnnnnnnnnnnnnnnnnnnnnnnnnnnnnnnnnnnnnnnnnnnnnnnnnnnnnnnnnnnnnnnnnnnnnnnnnnnnnnnnnnnnnnnnnnnnnnnnnnnnnnnnnnnnnnnnnnnnnnnnnnntgatttaccatttctgatatggattttggttgttgtcccccatgctttttctgtttttttcccatctttttgagtattaatataattttcaggtgtctcatattcatttgactggacaaaatgtgtggtcatatctttactggttcttattattataaaaataaaataaaaacaatttttaattttatgtaataaaaagaaaataaagaaggactattcactatgccaaaattagccatagatatcgccctttagatagcggagtgtatagagagcgttttagatagacggaatatgtaaacaatttgtttataggcggaatatatagatatcactaattgtattaagcgcgatcttttattgctcttatttaaggaaaatgaaaaacaaacactattgtgagaggctgagagccgtactttttttagagcaaacattatttttttttttaaaaaaaaaaaagagtaaacgttataaacaaaatgctctttttcgtgctacagtaactccgttcttgcttcgtctccttcaaagctacaaaacatataaaggggttaacgttgctctctctatacttcattgaaactcattcaaaatctcttgacacatctaagatttcgattcttctttgtcaacactgcctatggttctatcgttgtttactgactttaggtattagattgattaaattaagattaatatcattttatccaagggcatgcaaatttattatttcatattaaccttcaattgtcattatgtactgcatatatacaactctattttctgtttgcagagaaagaggctacccgtagtgttcaaattgtataccagagatgaaactatatagctagattttttagaataaaaaatgtggttctggtttattttcagttcatcttgtattttccattatgtttaagtctcttatattttgtttggtggatgcattttatcaaacaagttccccattaattaaaaaatgtttcattacgatggtttggcatctagaagaattttatttatttatttttatcatgttattggttagtttttttgttaataaggaagtcgaatccacaatctttcacttcctttctttttacttcatcactagatcaactttataagttgtatattataagaatgttgtctataaatttgatttaggttgctataaatgccaacttctaagactgggaactgaacctttgaatttgtagattatggttatcatgttttactttcattttcatcttcaatttctagaaaatctggatttaaatctgcttgatctagcaggggcaaggattttgaagattacgaatttctcccggcgaataagcccacattagaataatggtaaattaaattaattcgtatgtataacgtactatccatgcttttcatttcagttgtgtttctctattaaataataaaatatcaatattttaactgttagaaaagctaggtctttgagggttaatttggaattctattaatgagagagtgttttcttatggcaaactgccaaataagtccacatgaggccttggagttgtgttacagagtacatgattaacatcactatcactaccttcgaagtgtttctgatgtgaaaagaaatcactaattcattttgcttgatttattaataattataatgaagttaaataacatagcatcgtacatatgggtctgagttctagtatcataacatcatttcatccaataacaatgttacacggtcattttgtgctttgaaattttaatagggtagagtgtacttcatacttcctgatgcctatgttttgataccttgctttcaattcttacaacttttcttttatcttaatgattagttgttattttgataaataatatatagtattatatattataaattattaaacataaagtttaagatttatattttcttaaaaaatattctttaatcaatagaattcaaattaatttatatattgaaatcaatcgagataagttcgttatctattgagccatatgtggtccccggaagaagattcacaattcaacaccctgaattagttcaattttccttgctatgtgttttcttatgcctttttatttattttgtatctcattattgtgactgataatctcttaaccttatcagtaccatatataaacataggcagttatattttgcttgtagtagaacatggtactagagggtttttttttagcatataaataggtcttaggtcttatacctcaacttttttttactgctttcgttttcagacttagtttatagttttccggccacctttgtttgcacagaagttttctccttttttatcttcttctttgttcacctatactaagtactatttgaagaagtttaggaatccatagtcaaggaataaattcctcttattcgcataaattatttgatcattatttgagatcgtgtattatttgagatcgtgttgaaacaagactgattaaaacatattannnnnnnnnnnnnnnnnnnnnnnnnnnnnnnnnnnnnnnnnnnnnnnnnnnnnnnnnnnnnnnnnnnnnnnnnnnnnnnnnnnnnnnnnnnnnnnnnnnttaactttacttttacacgacaacggtacaatttctcatgtaattttgaattaattagggttagcttggattacatgttgagtacttgagttattggttttaattctattctcagaatttctctaatgtagatctgtgatagaaaaaaacaatgaaatagtaattacatttcccgttttgttatcgcagcaagtagcatggtaacataccggtaacataaatagctctttagaagcgctatctaattggaaaaataagcattatatataaagacacagttaacatatattatatataatattacgtatacataataaaaagaaggatagtactcaattgatgacaaaaggaataatagattttcctggaacataacaatacaactcttttaccatcgaaagataacaagtaagggaaattataaaaggaagaatagatgatctccctagaacatgacaataaagttaagtaacacctcaggaagacaacaacaaaaaatggtaaaaggagcaatacatcttcatgaatcataaaacaaataacagaacaacctaataaataaaataactatttttcaactttggctttcttaaaagccaacttctacaactgtgagatggttcaatccacttttgacaaactattgacaacttcaactccaagatttgtaaacataatttataatttctgtttaaaacaatcacattaagaacatgaacaagatttttagaattcatgagtttaacataaacatatatttgtacataattgcggaagatcttttatggtataatactttctcagagttttgaccctttcagttcttgtatcttcttttgatggtaataggatacaactctcatggatagacaataacgatattcagttttctagatccctacttattagaaactgaaccactaagcttaagataactcaacatatcaacagttttccttttaataactttcctttgtagccaattacccttatgtcctttattcattaaatcaaataatatttatttaaatgagccataatgataaatcttacattctcccacttggctcatgtcacaaattttatttcatgattaatgaaaacaattataattataatgcgcatacatagggctaaagttttcatacattggtctcatcataaatcatgatcagaaataaaatcaatgagagtcatggcggctctatgctatcaaattgacatagttcctttcatgtaccactttattaactcttcttcctaatatgatcctttaatggaagtttacatcataatgtcccacaataatactattatgtcttcgttagggacaaatcttgtttttcaaaataatcattcatacatgcatgtatacataaatttgaaaataggataattttcagaaacttaaacatcattgaattcagagtgtcaatagtcaataattacaataatgatcaatattcattagctgacataatgtccatactatatgcatgaccaataaatgtcttggacagtaatcccttcgtcaagggataagctaacataaaattagtgctaacatgctctatagacactctacttttctgaacctcttctttaacgacaaagtatttcaattccatgtgcttagcaccttttgaatacttttcgtttttagaaaagaagactgttgcagaattatcacactaaattttcagctgcctatccatactgtcgaccaattcaagctctgaaataaagtttcgcaaccatttagcctgaaccatggcttcaaaccatgtcacaaattcagcttccataatagatgcagcaattatagactgcttcacacttttccatgatatagttcctccagctaaaaaatacagataaccataagtagattttcttgtatccactcatcttgcaaaatctgagtctatgtatccaatcacttcaaggttactagacttcctataagtaagcatgtgacttagtgccttgcaaatatctcagaacgttctttgtagctttccaatgatccataccatgattactctggtatctttccaacattccaactgcaaagttaatatctagtctcttacaagtctgagcatacattaggctcccaacaagtgatgcatatggaattgcttccacttcctttcattccaattcattctcaggacattgcatgagactatacttgtctcctttttgaattgatactagagacgatgagcagttttgcattctaaatctctctaaaactttattaatatatgctttttgagacaaacctaacaatccttgtgatctatcacggaatatttctatcccaatcacataggatgccttagccatatctttcatttcaaagttactagagagaaacttcttagtctcattttaaaaactaagatcattagttgcaagtaagatatcatcaacatacaaaatcagtactataaacttactcccacttaccttcatatatatacaccgatcaacagtgttttctttaaatccaaaggaaacaacagtatcattgaacttaaggtaccattgtcttgaagcttgttttagtccgtatattgatttgttaagtttgcacatcatgtacttttttcccttttatatgaaccccattggttggtccatgtacacatcttcctctaaattcacatttagaaaggcgattttcacatccatctggtgtaactctagatcataatgagccaccaatgccataatgattcttagagaatcctttcttgaaactagttaaaaggtttctttatagtcaatgtcatcttcttgagtgaatctctttgcaactagtctggctttgtaccgttctaagttaccatgaaagtcatgtttgatcttaaagactcattttcattcaactctcttacatccttctggtaactcaacaaggtcccaaacctaattctgttccatagatttcaactcatctttcatggcatctaatcacttgtcaccatcttcactattcgtggcttgtgaaaaacgtcactagatcatcttttatacacaagtgaaattcagactcttgtagatataccacataatcattagaaatagtagatctccttttcctttgagatctttttaatgctatttgttgcggttcttctacaatgggttcattcagttcattcgcaatagtttcatcatgagcaatgggatcattcatttattgttcttcattattattaataggttcaataacatgaggaataacaactttactagagctacaagtcaaaggaacttgtactctcacttcttgtattgtcactttacatggtatttcactcacattatcttcaccatcttcaatgaacctagcatttccagtttctataatccttgtagtatgattaggacaataaaatctatacctttttgacttttcagaataaccaatgaaataaccactaattgtttttgtatccaatttcttttcttgtgggttgtagtatttaatttctgcctggcaacctgaaagatgcaggtgccttaagctaggtttccttcttgtccacaattcaaaatgagtctttggaactgctttactaggaaccttatttaatacatacatgctagcctttagagcataagtccacaatgaaatgggtaaagaagaattacttaacatacttctaaccatgtccaacaatgttttattacgcctttctgatacaccattctgttgtggtgtacctggcattgtgtattgagcacaaataccatgcttttctaggaatttagcaaatgtgggcccggatgttgtccactttcatcataccttccataatattcatcacccctatcagacctgacagttttcacctttctgtctaatttgtctttcaacttcattaatgtaaatctctaaagcatttatagcttgagatttatcatgtagtaaatagacataaccataacatgaataatcatcaatgaaggtgataaaatatttctctttattgaaagagttaacatcaaaaggatcgcaaacatcagtgtgtataatttcaagaagttgagtgcttcttgtggctcatttctttgtgtgttttatttgtttttctttgatacaattcacacaaacattcagatcagtaaaatctaaattctgaaggatttcattctttaccaatctttcaattctttctttggaaatgtgtcccaaacatttatgccacaagtaagccgaacattcattaattaagtacatctagtaccaacattatgatgcagagtcataagcgtttcaacataaagattatcaagacaatatataatccatcacataaagtacttgtacaaactgaaactatcactaccaaatttaaaagagtatccagctttatcaagtttggaaatagaaactaaattcctagatatactaggtacataaagagttttacagaagtccaaatgatgtccactatcaaggatcaaacggtaagccccaacagcttccactggaactttcactctattatccataaagacaaacttttcatttggccttgtggtttgggtcttacggaatccttgcaaaatattagaaacatgagttgtacatccagaatcaatccaccaagtattattatatggaacttcagtaaggtttgattcataacatacataagcacaaggcttacctttcttttcaaaccaagccttacgtttcgagcaatccttttggaagtgcccagccttaccaatgaaatgacatatgtttccattatgttccttcttgtggatttgagaagagaatgtccgattgatctttaatggtcatcttcccttcttctcatgcttcttaacactttttttttttagctccttgatgtttgacgtaattgatgaaatgaattctctggttcttaattatggtttcctcttgaactaacatattgtgcaattcatgcatattccatttgtctttcatggtattatagttcatttggaaaggaccatactcatatggtaatgagttcaatatgaactgcaccaggaaattttcatccacatccattcccaattacttcagtcttgctgcaatatttgtcatttcaataacatgctcatacatagtacgtgaaatgtaacatcctgaaaattatattatgagttatatttatgatttaattatggaagtgtgatgatagttggatacagaaaaaatagtatagaatttatttgaacataaactgctcaaaactgtccatttctgccacccgaattgagaaatttatttctctcttaattcttatccaaattaggtgtatgatttatggaattaaagatctagatgtctactataacatataaaaaattcagataaatatagagtgtgtacttcctacagtaacaagaatactaagagatgtcattgtcctaagttgaattcgctggcagctttggaagtctagattaaaaatgctatatcttgagttttacaactccaaataaggcacattatatcttcttagaaatattaggaagtctagtttaacatattaaaagatgagaatttttggactagtagattggtacaaaatgtacaatgagtgaaccccatttggttaagtgtttctagtcctttggaccttttggattgggcacaacttgtaactcttggacaaggaaataaaatcttcaaccccaaaaaggatgacaactcataggtttcatcagtccaagaacaatccacgtgcatataatccttcaagaagacaaataatgcacttaaacaacaagccaaatgcaaagattgaaaatataggctgctgtaaaatatttcttgctgaagtgaaaagatttgattaaggctttttttgtgcatgtgaaacaatttaaaccaaacaattgcattcccttgctcaaccaatatccacgtagaagtcagctgcccccaagtcaatgattaaaaaaatcaagataaggcttaaggttaaatatcttccaatgaaatgattacctagttaaaacctaactaaactaacttctaaaatcaattttaacccaactaaaatccttaaatctgaactaattaaagtagtataaatagacttatcttccttttcaaactcaacctattggattttttccatttcttaaaatggaccatttcatcctcttgcataagtaataacactatgtttctcttctctaagagtcaaatctaaatccattaccccaaggtaaaattcaattttctctttataagaagtttagtccattgaaaactgcaatagttgagaaaagtaaatgtgtagcaatagatactacaaggtataaaatttgaaaaaattaatgttttgaatcataaatatcacatactaacataattcacatattcatacatcataaaatgcatactaatgttcacctttgggaatccattaatacacaacattcagctataatgatgctaataaaatttttcgtaatttgacaataatacatacactaactagaattacatactatctttggatgtaatattcctaagtcccagcgcgtttggcgcgaattagggcgcgtatgacgcgattcgggaggtgtttgggcaaggattctgcagaaaaccttctgcagaattcttctgcagaatcgcggcgctgatggcgccaggctggcgctgagggcgccgcagtttaaaagtgtggcgctgatggcgccgttgtggcgcggttggcgccatgccctctgatggttggcgctcagggcgccaggacggcgctggtggcgccaatcccccttgagttttcccagcgggcgcggttggcgccaggttcggcgcggttggcgnnnnnnnnnnnnnnnnnnnnnnnnnnnnnnnnnnnnnnnnnnnnnnnnnnnnnnnnnnnnnnnnnnnnnnnnnnnnnnnnnnnnnnnnnnnnnnnnnnnnnnnnnnnnnnnnnnnnnnnnnnnnnnnnnnnnnnnnnnnnnnnnnnnnnnnnnnnnnnnnnnnnnnnnnnnnnnnnnnnnnnnnnnnnnnnnnnnnnnnnnnnnnnnnnnnnnnnnnnnnnnnnnnnnnnnnnnnnnnnnnnnnnnnnnnnnnnnnnnnnnnnnnnnnnnnnnnnnnnnnnnnnnnnnnnnnnnnnnnnnnnnnnnnnnnnnnnnnnnnnnnnnnnnnnnnnnnnnnnnnnnnnnnnnnnnnnnnnnnnnnnnnnnnnnnnnnnnnnnnnnnnnnnnnnnnnnnnnnnnnnnnnnnnnnnnnnnnnnnnnnnnnnnnnnnnnnnnnnnnnnnnnnnnnnnnnnnnnnnnnnnnnnnnnnnnnnnnnnnnnnnnnnnnnnnnnnnnnnnnnnnnnnnnnnnnnnnnnnnnnnnnnnnnnnnnnnnnnnnnnnnnnnnnnnnnnnnnnnnnnnnnnnnnnnnnnnnnnnnnnnnnnnnnnnnnnnnnnnnnnnnnnnnnnnnnnnnnnnnnnnnnnnnnnnnnnnnnnnnnnnnnnnnnnnnnnnnnnnnnnnnnnnnnnnnnnnnnnnnnnnnnnnnnnnnnnnnnnnnnnnnnnnnnnnnnnnnnnnnnnnnnnnnnnnnnnnnnnnnnnnnnnnnnnnnnnnnnnnnnnnnnnnnnnnnnnnnnnnnnnnnnnnnnnnnnnnnnnnnnnnnnnnnnnnnnnnnnnnnnnnnnnnnnnnnnnnnnnnnnnnnnnnnnnnnnnnnnnnnnnnnnnnnnnnnnnnnnnnnnnnnnnnnnnnnnnnnnnnnnnnnnnnnnnnnnnnnnnnnnnnnnnnnnnnnnnnnnnnnnnnnnnnnnnnnnnnnnnnnnnnnnnnnnnnnnnnnnnnnnnnnnnnnnnnnnnnnnnnnnnnnnnnnnnnnnnnnnnnnnnnnnnnnnnnnnnnnnnnnnnnnnnnnnnnnnnnnnnnnnnnnnnnnnnnnnnnnnnnnnnnnnnnnnnnnnnnnnnnnnnnnnnnnnnnnnnnnnnnnnnnnnnnnnnnnnnnnnnnnnnnnnnnnnnnnnnnnnnnnnnnnnnnnnnnnnnnnnnnnnnnnnnnnnnnnnnnnnnnnnnnnnnnnnnnnnnnnnnnnnnnnnnnnnnnnnnnnnnnnnnnnnnnnnnnnnnnnnnnnnnnnnnnnnnnnnnnnnnnnnnnnnnnnnnnnnnnnnnnnnnnnnnnnnnnnnnnnnnnnnnnnnnnnnnnnnnnnnnnnnnnnnnnnnnnnnnnnnnnnnnnnnnnnnnnnnnnnnnnnnnnnnnnnnnnnnnnnnnnnnnnnnnnnnnnnnnnnnnnnnnnnnnnnnnnnnnnnnnnnnnnnnnnnnnnnnnnnnnnnnnnnnnnnnnnnnnnnnnnnnnnnnnnnnnnnnnnnnnnnnnnnnnnnnnnnnnnnnnnnnnnnnnnnnnnnnnnnnnnnnnnnnnnnnnnnnnnnnnnnnnnnnnnnnnnnnnnnnnnnnnnnnnnnnnnnnnnnnnnnnnnnnnnnnnnnnnnnnnnnnnnnnnnnnnnnnnnnnnnnnnnnnnnnnnnnnnnnnnnnnnnnnnnnnnnnnnnnnnnnnnnnnnnnnnnnnnnnnnnnnnnnnnnnnnnnnnnnnnnnnnnnnnnnnnnnnnnnnnnnnnnnnnnnnnnnnnnnnnnnnnnnnnnnnnnnnnnnnnnnnnnnnnnnnnnnnnnnnnnnnnnnnnnnnnnnnnnnnnnnnnnnnnnnnnnnnnnnnnnnnnnnnnnnnnnnnnnnnnnnnnnnnnnnnnnnnnnnnnnnnnnnnnnnnnnnnnnnnnnnnnnnnnnnnnnnnnnnnnnnnnnnnnnnnnnnnnnnnnnnnnnnnnnnnnnnnnnnnnnnnnnnnnnnnnnnnnnnnnnnnnnnnnnnnnnnnnnnnnnnnnnnnnnnnnnnnnnnnnnnnnnnnnnnnnnnnnnnnnnnnnnnnnnnnnnnnnnnnnnnnnnnnnnnnnnnnnnnnnnnnnnnnnnnnnnnnnnnnnnnnnnnnnnnnnnnnnnnnnnnnnnnnnnnnnnnnnnnnnnnnnnnnnnnnnnnnnnnnnnnnnnnnnnnnnnnnnnnnnnnnnnnnnnnnnnnnnnnnnnnnnnnnnnnnnnnnnnnnnnnnnnnnnnnnnnnnnnnnnnnnnnnnnnnnnnnnnnnnnnnnnnnnnnnnnnnnnnnnnnnnnnnnnnnnnnnnnnnnnnnnnnnnnnnnnnnnnnnnnnnnnnnnnnnnnnnnnnnnnnnnnnnnnnnnnnnnnnnnnnnnnnnnnnnnnnnnnnnnnnnnnnnnnnnnnnnnnnnnnnnnnnnnnnnnnnnnnnnnnnnnnnnnnnnnnnnnnnnnnnnnnnnnnnnnnnnnnnnnnnnnnnnnnnnnnnnnnnnnnnnnnnnnnnnnnnnnnnnnnnnnnnnnnnnnnnnnnnnnnnnnnnnnnnnnnnnnnnnnnnnnnnnnnnnnnnnnnnnnnnnnnnnnnnnnnnnnnnnnnnnnnnnnnnnnnnnnnnnnnnnnnnnnnnnnnnnnnnnnnnnnnnnnnnnnnnnnnnnnnnnnnnnnnnnnnnnnnnnnnnnnnnnnnnnnnnnnnnnnnnnnnnnnnnnnnnnnnnnnnnnnnnnnnnnnnnnnnnnnnnnnnnnnnnnnnnnnnnnnnnnnnnnnnnnnnnnnnnnnnnnnnnnnnnnnnnnnnnnnnnnnnnnnnnnnnnnnnnnnnnnnnnnnnnnnnnnnnnnnnnnnnnnnnnnnnnnnnnnnnnnnnnnnnnnnnnnnnnnnnnnnnnnnnnnnnnnnnnnnnnnnnnnnnnnnnnnnnnnnnnnnnnnnnnnnnnnnnnnnnnnnnnnnnnnnnnnnnnnnnnnnnnnnnnnnnnnnnnnnnnnnnnnnnnnnnnnnnnnnnnnnnnnnnnnnnnnnnnnnnnnnnnnnnnnnnnnnnnnnnnnnnnnnnnnnnnnnnnnnnnnnnnnnnnnnnnnnnnnnnnnnnnnnnnnnnnnnnnnnnnnnnnnnnnnnnnnnnnnnnnnnnnnnnnnnnnnnnnnnnnnnnnnnnnnnnnnnnnnnnnnnnnnnnnnnnnnnnnnnnnnnnnnnnnnnnnnnnnnnnnnnnnnnnnnnnnnnnnnnnnnnnnnnnnnnnnnnnnnnnnnnnnnnnnnnnnnnnnnnnnnnnnnnnnnnnnnnnnnnnnnnnnnnnnnnnnnnnnnnnnnnnnnnnnnnnnnnnnnnnnnnnnnnnnnnnnnnnnnnnnnnnnnnnnnnnnnnnnnnnnnnnnnnnnnnnnnnnnnnnnnnnnnnnnnnnnnnnnnnnnnnnnnnnnnnnnnnnnnnnnnnnnnnnnnnnnnnnnnnnnnnnnnnnnnnnnnnnnnnnnnnnnnnnnnnnnnnnnnnnnnnnnnnnnnnnnnnnnnnnnnnnnnnnnnnnnnnnnnnnnnnnnnnnnnnnnnnnnnnnnnnnnnnnnnnnnnnnnnnnnnnnnnnnnnnnnnnnnnnnnnnnnnnnnnnnnnnnnnnnnnnnnnnnnnnnnnnnnnnnnnnnnnnnnnnnnnnnnnnnnnnnnnnnnnnnnnnnnnnnnnnnnnnnnnnnnnnnnnnnnnnnnnnnnnnnnnnnnnnnnnnnnnnnnnnnnnnnnnnnnnnnnnnnnnnnnnnnnnnnnnnnnnnnnnnnnnnnnnnnnnnnnnnnnnnnnnnnnnnnnnnnnnnnnnnnnnnnnnnnnnnnnnnnnnnnnnnnnnnnnnnnnnnnnnnnnnnnnnnnnnnnnnnnnnnnnnnnnnnnnnnnnnnnnnnnnnnnnnnnnnnnnnnnnnnnnnnnnnnnnnnnnnnnnnnnnnnnnnnnnnnnnnnnnnnnnnnnnnnnnnnnnnnnnnnnnnnnnnnnnnnnnnnnnnnnnnnnnnnnnnnnnnnnnnnnnnnnnnnnnnnnnnnnnnnnnnnnnnnnnnnnnnnnnnnnnnnnnnnnnnnnnnnnnnnnnnnnnnnnnnnnnnnnnnnnnnnnnnnnnnnnnnnnnnnnnnnnnnnnnnnnnnnnnnnnnnnnnnnnnnnnnnnnnnnnnnnnnnnnnnnnnnnnnnnnnnnnnnnnnnnnnnnnnnnnnnnnnnnnnnnnnnnnnnnnnnnnnnnnnnnnnnnnnnnnnnnnnnnnnnnnnnnnnnnnnnnnnnnnnnnnnnnnnnnnnnnnnnnnnnnnnnnnnnnnnnnnnnnnnnnnnnnnnnnnnnnnnnnnnnnnnnnnnnnnnnnnnnnnnnnnnnnnnnnnnnnnnnnnnnnnnnnnnnnnnnnnnnnnnnnnnnnnnnnnnnnnnnnnnnnnnnnnnnnnnnnnnnnnnnnnnnnnnnnnnnnnnnnnnnnnnnnnnnnnnnnnnnnnnnnnnnnnnnnnnnnnnnnnnnnnnnnnnnnnnnnnnnnnnnnnnnnnnnnnnnnnnnnnnnnnnnnnnnnnnnnnnnnnnnnnnnnnnnnnnnnnnnntatgcttccaggcaactgaagcctcatgaggagtcttatcctacccatgatttagagcttgcagccgtggtgtttgctctaaagatttggaggcactatctgtatggtgctaagctggtggtgttcagtgaccacaagagtctcaagtacctctttgaccagaaagagctgaatatgagacagaggcggtggatggaatttctcaaagactatgattttgagttgagataccatccgggcaaggcaaatgttgtggctgatgccttgagcaggaaacatgtgagtgcagcctgcatgatgatctctgattgcaagttggttgagcaattcagagacatgcacctgaatgtggctgtaggtgcccatggtcttgagttgagcaggaccaaggtgtctaatgatctgattcggaggatccgagagacacagaagcaagatgaggatgtgagggctatgattggccaacaggatgtttcctgggaggattacgacttggtgatgtatcaggatcggattgtggtgcctaagggcgagttgagggacgtcgtcctaactgaggctcacaagggccaattcagtatctatcccggtgctactaagatgtatcaagacttgaagaggcaattctggtggccggggatgaagaaagacatagccgagtatgtggctaagtgtcttgtgtgtcagaaggtaaagattgagcatcagagaccatctggtatgttacagcctttacaggtcccggaatggaagtgggatagcatttccatggactttgtggtagggttaccgagaactcagggtggatgtaattccatctgggtgattgtggataggctgaccaagtctgctcatttcttgcctgtgagatctgactacacaacggaaaagttggcccagttgtatgtcagggagatcgtgaggttgcatggaatccctgatagcatcgtcagtgatagagacccgaagttcacctctaggttctggggtgcgcttcaggaagctttcggtacccagctgaggctaagcacgacctatcatcctcagaccgatggtcagattgagaggaccatccagactctggaggacatgttgagagcatgtgccatggagcagggcacgagctgggatagatacttacctctggtggagttttcctacaacaacaactttcatgcgagtttgggcatggccccgtatgaagccttgtatggccggcggtgtaggactccagtgtgttggaccgaggtaggtgagaagcagctccttggacctgagatggttcaagagacgtctgagcagatcaagatgatcagagataagttgctgaaagctcagagtcgtcagaagagctactatgatcatagacacagacccctgcagtttgatgagggtgatcatgtgttcttgagattgtctccggttacgggtgtgggacgagccttgggagtaaggaagctgagtcctaggttcatcggtccctatcagatccttcagagggtcgggccggttgcatataggctagctttacctccccagttggcggggttgcacgatgtgttccatgtatctcagctgaggagatatgtggcagatccttcacatgtggttgagccc

SEQ ID NO: 3 - DNA, 544693 bp, Glycine tomentella
  misc_feature (2824)..(3394): n is a, c, g, or t
  misc_feature (4219)..(8346): n is a, c, g, or t
  misc_feature (38749)..(41427): n is a, c, g, or t
  misc_feature (41924)..(42098): n is a, c, g, or t
  misc_feature (43720)..(43729): n is a, c, g, or t
  misc_feature (51730)..(51730): n is a, c, g, or t
  misc_feature (67482)..(67482): n is a, c, g, or t
  misc_feature (67898)..(67959): n is a, c, g, or t
  misc_feature (72674)..(72749): n is a, c, g, or t
  misc_feature (74308)..(74512): n is a, c, g, or t
  misc_feature (81513)..(81522): n is a, c, g, or t
  misc_feature (84680)..(84701): n is a, c, g, or t
  misc_feature (85175)..(85251): n is a, c, g, or t
  misc_feature (85950)..(85959): n is a, c, g, or t
  misc_feature (86579)..(86643): n is a, c, g, or t
  misc_feature (99640)..(99729): n is a, c, g, or t
  misc_feature (107233)..(107242): n is a, c, g, or t
  misc_feature (130047)..(130231): n is a, c, g, or t
  misc_feature (135405)..(135410): n is a, c, g, or t
  misc_feature (148737)..(148777): n is a, c, g, or t
  misc_feature (151961)..(151970): n is a, c, g, or t
  misc_feature (152393)..(152402): n is a, c, g, or t
  misc_feature (156038)..(156272): n is a, c, g, or t
  misc_feature (163528)..(163819): n is a, c, g, or t
  misc_feature (164473)..(164473): n is a, c, g, or t
  misc_feature (172818)..(173616): n is a, c, g, or t
  misc_feature (192299)..(193077): n is a, c, g, or t
  misc_feature (193442)..(193451): n is a, c, g, or t
  misc_feature (206042)..(206051): n is a, c, g, or t
  misc_feature (209514)..(210341): n is a, c, g, or t
  misc_feature (220578)..(220640): n is a, c, g, or t
  misc_feature (221018)..(221018): n is a, c, g, or t
  misc_feature (224164)..(225472): n is a, c, g, or t
  misc_feature (225903)..(226058): n is a, c, g, or t
  misc_feature (227573)..(227779): n is a, c, g, or t
  misc_feature (228401)..(228502): n is a, c, g, or t
  misc_feature (233521)..(233539): n is a, c, g, or t
  misc_feature (234934)..(234974): n is a, c, g, or t
  misc_feature (240207)..(240216): n is a, c, g, or t
  misc_feature (240622)..(240894): n is a, c, g, or t
  misc_feature (247204)..(247213): n is a, c, g, or t
  misc_feature (247520)..(247529): n is a, c, g, or t
  misc_feature (247859)..(247868): n is a, c, g, or t
  misc_feature (278354)..(278363): n is a, c, g, or t
  misc_feature (278938)..(278951): n is a, c, g, or t
  misc_feature (279493)..(279502): n is a, c, g, or t
  misc_feature (282361)..(282381): n is a, c, g, or t
  misc_feature (285535)..(285603): n is a, c, g, or t
  misc_feature (287603)..(294585): n is a, c, g, or t
  misc_feature (295702)..(296876): n is a, c, g, or t
  misc_feature (298099)..(298295): n is a, c, g, or t
  misc_feature (298702)..(298711): n is a, c, g, or t
  misc_feature (313970)..(314001): n is a, c, g, or t
  misc_feature (323257)..(323530): n is a, c, g, or t
  misc_feature (324174)..(324402): n is a, c, g, or t
  misc_feature (324826)..(324835): n is a, c, g, or t
  misc_feature (326021)..(326049): n is a, c, g, or t
  misc_feature (341702)..(341711): n is a, c, g, or t
  misc_feature (342155)..(342164): n is a, c, g, or t
  misc_feature (344925)..(350833): n is a, c, g, or t
  misc_feature (353147)..(354174): n is a, c, g, or t
  misc_feature (358759)..(359305): n is a, c, g, or t
  misc_feature (361783)..(362993): n is a, c, g, or t
  misc_feature (364103)..(364112): n is a, c, g, or t
  misc_feature (364423)..(364432): n is a, c, g, or t
  misc_feature (369770)..(369779): n is a, c, g, or t
  misc_feature (370242)..(370251): n is a, c, g, or t
  misc_feature (375191)..(375200): n is a, c, g, or t
  misc_feature (376142)..(376151): n is a, c, g, or t
  misc_feature (377832)..(377846): n is a, c, g, or t
  misc_feature (382117)..(382139): n is a, c, g, or t
  misc_feature (388040)..(388052): n is a, c, g, or t
  misc_feature (391001)..(391010): n is a, c, g, or t
  misc_feature (412789)..(412881): n is a, c, g, or t
  misc_feature (416613)..(418051): n is a, c, g, or t
  misc_feature (420311)..(420320): n is a, c, g, or t
  misc_feature (421909)..(421918): n is a, c, g, or t
  misc_feature (422888)..(423753): n is a, c, g, or t
  misc_feature (425048)..(425057): n is a, c, g, or t
  misc_feature (425325)..(425555): n is a, c, g, or t
  misc_feature (438485)..(438542): n is a, c, g, or t
  misc_feature (446449)..(446458): n is a, c, g, or t
  misc_feature (457636)..(457645): n is a, c, g, or t
  misc_feature (458758)..(458767): n is a, c, g, or t
  misc_feature (460747)..(460785): n is a, c, g, or t
  misc_feature (464287)..(465821): n is a, c, g, or t
  misc_feature (467742)..(467742): n is a, c, g, or t
  misc_feature (477206)..(477616): n is a, c, g, or t
  misc_feature (480127)..(483332): n is a, c, g, or t
  misc_feature (493302)..(493326): n is a, c, g, or t
  misc_feature (494771)..(494819): n is a, c, g, or t
  misc_feature (495111)..(495120): n is a, c, g, or t
  misc_feature (501665)..(501665): n is a, c, g, or t
  misc_feature (507786)..(507786): n is a, c, g, or t
  misc_feature (508485)..(508494): n is a, c, g, or t
  misc_feature (512231)..(512494): n is a, c, g, or t
  misc_feature (516907)..(517504): n is a, c, g, or t
  misc_feature (520310)..(522340): n is a, c, g, or t
  misc_feature (524435)..(532923): n is a, c, g, or t
  misc_feature (534543)..(535814): n is a, c, g, or t
  misc_feature (541226)..(542820): n is a, c, g, or t
cgagaaccgatgttaaaagtccaaaataaccgatgttgaaagctgcttttctagtagtgaatccaactaagaagctgaatggtaaaggtataagatttgattggatagttacatccatcttcaaaaatgttctcattgaaggccaatgttaattaatgctaatgtcaaaacactaattacatctatgttggagctaacaataacaacaaattaggtttgagaaattaaatccctaatgttctgtcaaatgttattacttgtttgtgggactagagaaaccccaaagcgtacctggtcgtggtttgtgtggtggtgtcgtggcggtgcttggtggtgtgcgtttggcttttgagtcaccggagacagaggaagaagaaaccacagcttgagcttggcgggattacggtgtgataatggaggaagaagacacctacatgcacagctgaagcattcgaaacgcgtgcgaggatgcgctcatggtggttgcacaactgaagcttgcggcggcagtgacacaaagggtaagaaggctacaggatttggcaacacacatgacggaaaaaattagggttgggccttttgttttccgtataaatgcaatttccgacggacagaacggtatcggaaacatccgtcggaatctcccaattttccccaccaaataagctttgtcggtattgtccgtgggtaaggctttcaattccgacggaattgctctggccggaaatggcccgtcggaaccaagcgcttttcttgtagtgtatcccgataattactgtttgactattcgttattattaagtttatatatatatatatatatataaatataacagacagacatatatatagtgcaagtaaatacactagttatacatagtacactagtacaaaatattactagaaaagagataaaccacaaatggtttggattttgattgaaaatgacaaatttagctataaaggagaaagttagttagttacggtattaagataaagatatatgttggtgtgttttattccgaccgagtaagagtgttggtgagtttatttatacacaaagaatcttgcagtgagtaagttccaacctttgaatgaacacgaatacgcatcaaaagttccaactttgcagcctgcactacactaaacacacacacaaacattgcagactatcagcaacaaggattcccttttccagtggtacaatcccaaacaggaccaccaaaaatgttccctactaattattgcctgccccattaattttcttaattccatcgttaacaacccccttaattctttcccatctttatcttcttttgtcccttaacctagctatcatatatcccatattattgatttcttattcatcataataaaaaaaaaatattatgttcatatgatatcaaagcaaagaaaagagccaacataggagcaatgattcctcaagataatgcatccatctcttctctttttggatttgagcacattcctctcccccactaacatctttcttttggtttttatagattggccctactagcattttagtagaatatattgtctgaatcatatagcagggttatatgttgagagactttaatatatttattcacattatttttttactatatatttgggaaataatttaatttataagaaaataatattttcacataaaaatatttaattttaggcatggggatatgacctaaatatttatcatatcatcaattcttttaaggaaaataaaaactattaattaaaaatataaagaatactttatcccatatgtaaatttgtactaaaaaatcttatatacttaaagtaactgcctaactaacttttttctccaaaatcaagtatataaataagcaccttggtatgaactcaacttttccctaatcttattttcattcactcttctctctcagatatcgacttaggcatcagagtgcttgcatgtgcaactcctgacaccttgttccacaattagatattaagatctgaccaagatcttcgtcatacgactgtatctctgccatttccaccgaacatattcattaatttttatttattttagtaaaataatgtttagcatatttatttttatgttaattaattttccaagaataaatatatctaacttttagcatataccttcatgtcgttcctaaatttataattcaaaataaattgtttttgattgttttgtcagcaaaataacatatattaagaggggtatccaaatccatatacaaagttcatactgcctatatggctttcatgctaagtataaggttcatagaccattcataaaaagaaaaagaaccctttcaacttgatatttactataaaccaagacctaaattttataacgttcataacatgctccacatttgcaatattgcgtttaaaattaaaataatgttatttctatgcaaccatacagatcaaatgaaagcaaatctcacaacctccatgccactaaacctttcaaatcgatcttttctctgttagaccatagcacaactaaattgctttttttttattgtatcgatatatggctatttcacgacgcgcaatctacgtcggttgtgaaataaccgactatgtatgtgaaccggtggcatttttgtaattaatttaacaatattccaaaaaccaagtcggtcctgttatagcccgtccttgtttaccaatattcaaagtcggtttgtatatgaaccgactttgatgctttgtaaaaattttagctatttctgcacaaaaaaaatcataacctaggtcacagctttctcgcgactttgagtccctaacccactctnnnnnnnnnnnnnnnnnnnnnnnnnnnnnnnnnnnnnnnnnnnnnnnnnnnnnnnnnnnnnnnnnnnnnnnnnnnnnnnnnnnnnnnnnnnnnnnnnnnnnnnnnnnnnnnnnnnnnnnnnnnnnnnnnnnnnnnnnnnnnnnnnnnnnnnnnnnnnnnnnnnnnnnnnnnnnnnnnnnnnnnnnnnnnnnnnnnnnnnnnnnnnnnnnnnnnnnnnnnnnnnnnnnnnnnnnnnnnnnnnnnnnnnnnnnnnnnnnnnnnnnnnnnnnnnnnnnnnnnnnnnnnnnnnnnnnnnnnnnnnnnnnnnnnnnnnnnnnnnnnnnnnnnnnnnnnnnnnnnnnnnnnnnnnnnnnnnnnnnnnnnnnnnnnnnnnnnnnnnnnnnnnnnnnnnnnnnnnnnnnnnnnnnnnnnnnnnnnnnnnnnnnnnnnnnnnnnnnnnnnnnnnnnnnnnnnnnnnnnnnnnnnnnnnnnnnnnnnnnnnnnnnnnnnnnnnnnnnnnnnnnnnnnnnnnnnnnnnnnnnnnnnnnnnnnnnnnnnnnnnnnnnnnnnnnnnnnnnnnnnnnnnnnnnnntcgagaaccgatgttaaaagtccaaaataaccgatgttgaaagctgcttttctagtagtgaatccaactaagaagctgaatggtaaaggtataagatttgattggatagttacatccatcttcaaaaatgttctcattgaaggccaatgttaattaatgctaatgtcaaaacactaattacatctatgttggagctaacaataacaacaaattaggtttgagaaattaaatccctaatgttctgtcaaatgttattacttgtttgtgggactagagaaaccccaaagcgtacctggtcgtggtttgtgtggtggtgtcgtggcggtgcttggtggtgtgcgtttggcttttgagtcaccggagacagaggaagaagaaaccacagcttgagcttggcgggattacggtgtgataatggaggaagaagacacctacatgcacagctgaagcattcgaaacgcgtgcgaggatgcgctcatggtggttgcacaactgaagcttgcggcggcagtgacacaaagggtaagaaggctacaggatttggcaacacacatgacggaaaaaattagggttgggccttttgttttccgtataaatgcaatttccgacggacagaacggtatcggaaacatccgtcggaatctcccaattttccccaccaaataagctttgtcggtattgtccgtgggtaaggctttcaattccgacggaattgctctggccggaaatggcccgtcggaaccaagcgcttttcttgtagtgtatcccgataattactgtttgactattcgttattattaagtttatatatatatatatatatannnnnnnnnnnnnnnnnnnnnnnnnnnnnnnnnnnnnnnnnnnnnnnnnnnnnnnnnnnnnnnnnnnnnnnnnnnnnnnnnnnnnnnnnnnnnnnnnnnnnnnnnnnnnnnnnnnnnnnnnnnnnnnnnnnnnnnnnnnnnnnnnnnnnnnnnnnnnnnnnnnnnnnnnnnnnnnnnnnnnnnnnnnnnnnnnnnnnnnnnnnnnnnnnnnnnnnnnnnnnnnnnnnnnnnnnnnnnnnnnnnnnnnnnnnnnnnnnnnnnnnnnnnnnnnnnnnnnnnnnnnnnnnnnnnnnnnnnnnnnnnnnnnnnnnnnnnnnnnnnnnnnnnnnnnnnnnnnnnnnnnnnnnnnnnnnnnnnnnnnnnnnnnnnnnnnnnnnnnnnnnnnnnnnnnnnnnnnnnnnnnnnnnnnnnnnnnnnnnnnnnnnnnnnnnnnnnnnnnnnnnnnnnnnnnnnnnnnnnnnnnnnnnnnnnnnnnnnnnnnnnnnnnnnnnnnnnnnnnnnnnnnnnnnnnnnnnnnnnnnnnnnnnnnnnnnnnnnnnnnnnnnnnnnnnnnnnnnnnnnnnnnnnnnnnnnnnnnnnnnnnnnnnnnnnnnnnnnnnnnnnnnnnnnnnnnnnnnnnnnnnnnnnnnnnnnnnnnnnnnnnnnnnnnnnnnnnnnnnnnnnnnnnnnnnnnnnnnnnnnnnnnnnnnnnnnnnnnnnnnnnnnnnnnnnnnnnnnnnnnnnnnnnnnnnnnnnnnnnnnnnnnnnnnnnnnnnnnnnnnnnnnnnnnnnnnnnnnnnnnnnnnnnnnnnnnnnnnnnnnnnnnnnnnnnnnnnnnnnnnnnnnnnnnnnnnnnnnnnnnnnnnnnnnnnnnnnnnnnnnnnnnnnnnnnnnnnnnnnnnnnnnnnnnnnnnnnnnnnnnnnnnnnnnnnnnnnnnnnnnnnnnnnnnnnnnnnnnnnnnnnnnnnnnnnnnnnnnnnnnnnnnnnnnnnnnnnnnnnnnnnnnnnnnnnnnnnnnnnnnnnnnnnnnnnnnnnnnnnnnnnnnnnnnnnnnnnnnnnnnnnnnnnnnnnnnnnnnnnnnnnnnnnnnnnnnnnnnnnnnnnnnnnnnnnnnnnnnnnnnnnnnnnnnnnnnnnnnnnnnnnnnnnnnnnnnnnnnnnnnnnnnnnnnnnnnnnnnnnnnnnnnnnnnnnnnnnnnnnnnnnnnnnnnnnnnnnnnnnnnnnnnnnnnnnnnnnnnnnnnnnnnnnnnnnnnnnnnnnnnnnnnnnnnnnnnnnnnnnnnnnnnnnnnnnnnnnnnnnnnnnnnnnnnnnnnnnnnnnnnnnnnnnnnnnnnnnnnnnnnnnnnnnnnnnnnnnnnnnnnnnnnnnnnnnnnnnnnnnnnnnnnnnnnnnnnnnnnnnnnnnnnnnnnnnnnnnnnnnnnnnnnnnnnnnnnnnnnnnnnnnnnnnnnnnnnnnnnnnnnnnnnnnnnnnnnnnnnnnnnnnnnnnnnnnnnnnnnnnnnnnnnnnnnnnnnnnnnnnnnnnnnnnnnnnnnnnnnnnnnnnnnnnnnnnnnnnnnnnnnnnnnnnnnnnnnnnnnnnnnnnnnnnnnnnnnnnnnnnnnnnnnnnnnnnnnnnnnnnnnnnnnnnnnnnnnnnnnnnnnnnnnnnnnnnnnnnnnnnnnnnnnnnnnnnnnnnnnnnnnnnnnnnnnnnnnnnnnnnnnnnnnnnnnnnnnnnnnnnnnnnnnnnnnnnnnnnnnnnnnnnnnnnnnnnnnnnnnnnnnnnnnnnnnnnnnnnnnnnnnnnnnnnnnnnnnnnnnnnnnnnnnnnnnnnnnnnnnnnnnnnnnnnnnnnnnnnnnnnnnnnnnnnnnnnnnnnnnnnnnnnnnnnnnnnnnnnnnnnnnnnnnnnnnnnnnnnnnnnnnnnnnnnnnnnnnnnnnnnnnnnnnnnnnnnnnnnnnnnnnnnnnnnnnnnnnnnnnnnnnnnnnnnnnnnnnnnnnnnnnnnnnnnnnnnnnnnnnnnnnnnnnnnnnnnnnnnnnnnnnnnnnnnnnnnnnnnnnnnnnnnnnnnnnnnnnnnnnnnnnnnnnnnnnnnnnnnnnnnnnnnnnnnnnnnnnnnnnnnnnnnnnnnnnnnnnnnnnnnnnnnnnnnnnnnnnnnnnnnnnnnnnnnnnnnnnnnnnnnnnnnnnnnnnnnnnnnnnnnnnnnnnnnnnnnnnnnnnnnnnnnnnnnnnnnnnnnnnnnnnnnnnnnnnnnnnnnnnnnnnnnnnnnnnnnnnnnnnnnnnnnnnnnnnnnnnnnnnnnnnnnnnnnnnnnnnnnnnnnnnnnnnnnnnnnnnnnnnnnnnnnnnnnnnnnnnnnnnnnnnnnnnnnnnnnnnnnnnnnnnnnnnnnnnnnnnnnnnnnnnnnnnnnnnnnnnnnnnnnnnnnnnnnnnnnnnnnnnnnnnnnnnnnnnnnnnnnnnnnnnnnnnnnnnnnnnnnnnnnnnnnnnnnnnnnnnnnnnnnnnnnnnnnnnnnnnnnnnnnnnnnnnnnnnnnnnnnnnnnnnnnnnnnnnnnnnnnnnnnnnnnnnnnnnnnnnnnnnnnnnnnnnnnnnnnnnnnnnnnnnnnnnnnnnnnnnnnnnnnnnnnnnnnnnnnnnnnnnnnnnnnnnnnnnnnnnnnnnnnnnnnnnnnnnnnnnnnnnnnnnnnnnnnnnnnnnnnnnnnnnnnnnnnnnnnnnnnnnnnnnnnnnnnnnnnnnnnnnnnnnnnnnnnnnnnnnnnnnnnnnnnnnnnnnnnnnnnnnnnnnnnnnnnnnnnnnnnnnnnnnnnnnnnnnnnnnnnnnnnnnnnnnnnnnnnnnnnnnnnnnnnnnnnnnnnnnnnnnnnnnnnnnnnnnnnnnnnnnnnnnnnnnnnnnnnnnnnnnnnnnnnnnnnnnnnnnnnnnnnnnnnnnnnnnnnnnnnnnnnnnnnnnnnnnnnnnnnnnnnnnnnnnnnnnnnnnnnnnnnnnnnnnnnnnnnnnnnnnnnnnnnnnnnnnnnnnnnnnnnnnnnnnnnnnnnnnnnnnnnnnnnnnnnnnnnnnnnnnnnnnnnnnnnnnnnnnnnnnnnnnnnnnnnnnnnnnnnnnnnnnnnnnnnnnnnnnnnnnnnnnnnnnnnnnnnnnnnnnnnnnnnnnnnnnnnnnnnnnnnnnnnnnnnnnnnnnnnnnnnnnnnnnnnnnnnnnnnnnnnnnnnnnnnnnnnnnnnnnnnnnnnnnnnnnnnnnnnnnnnnnnnnnnnnnnnnnnnnnnnnnnnnnnnnnnnnnnnnnnnnnnnnnnnnnnnnnnnnnnnnnnnnnnnnnnnnnnnnnnnnnnnnnnnnnnnnnnnnnnnnnnnnnnnnnnnnnnnnnnnnnnnnnnnnnnnnnnnnnnnnnnnnnnnnnnnnnnnnnnnnnnnnnnnnnnnnnnnnnnnnnnnnnnnnnnnnnnnnnnnnnnnnnnnnnnnnnnnnnnnnnnnnnnnnnnnnnnnnnnnnnnnnnnnnnnnnnnnnnnnnnnnnnnnnnnnnnnnnnnnnnnnnnnnnnnnnnnnnnnnnnnnnnnnnnnnnnnnnnnnnnnnnnnnnnnnnnnnnnnnnnnnnnnnnnnnnnnnnnnnnnnnnnnnnnnnnnnnnnnnnnnnnnnnnnnnnnnnnnnnnnnnnnnnnnnnnnnnnnnnnnnnnnnnnnnnnnnnnnnnnnnnnnnnnnnnnnnnnnnnnnnnnnnnnnnnnnnnnnnnnnnnnnnnnnnnnnnnnnnnnnnnnnnnnnnnnnnnnnnnnnnnnnnnnnnnnnnnnnnnnnnnnnnnnnnnnnnnnnnnnnnnnnnnnnnnnnnnnnnnnnnnnnnnnnnnnnnnnnnnnnnnnnnnnnnnnnnnnnnnnnnnnnnnnnnnnnnnnnnnnnnnnnnnnnnnnnnnnnnnnnnnnnnnnnnnnnnnnnnnnnnnnnnnnnnnnnnnnnnnnnnnnnnnnnnnnnnnnnnnnnnnnnnnnnnnnnnnnnnnnnnnnnnnnnnnnnnnnnnnnnnnnnnnnnnnnnnnnnnnnnnnnnnnnnnnnnnnnnnnnnnnnnnnnnnnnnnnnnnnnnnnnnnnnnnnnnnnnnnnnnnnnnnnnnnnnnnnnnnnnnnnnnnnnnnnnnnnnnnnnnnnnnnnnnnnnnnnnnnnnnnnnnnnnnnnnnnnnnnnnnnnnnnnnctatagcatgattaagtgtttgtactttgaagtcatatctatgtactcagtgttattgaattaatccttatatataatatatattgaatatattgactttagttatttgtagtatattcactgcttcctccgttcttttttgttaattaatgggaaattcaaaaataaaatagtgtttaaaaaaaaatgggaacttcaaagtcggttatttaaaataactgacattgttgtcatactttctaagtcggttatttacgaaaccgactttgtatctaagctatctaagtcagtttttacaaaaaattgactttgtatttatgctttctaagtcggttatttaaggaaccgactttgtatacgagatatctaagtcagttatttaaaaaaactgactttgtattcatgctttctaagtcggttatttaagaaaccgacattgtattcagatattctaagtcggttattataataaccgactttatttttaagctttctaagtcggttttttaaaataaccgacttagaatacccgaatttttttaaaaaaaaaaattaaaaaaaaaaaatttcaaagtcggttttctaaaaaccgacattgtaagcttttggattttacgacgtctaatacaaggtcggttataaaaccgactttaaatggtgtaaataaccgactttaaatatgccttctgtagtagtggtgattccatactagaaaaagatatatccaacttcttttatttctctaggcttgattgcatatatatgggggcattaaagtgacaaccaacttcaaactaatgctttgaaatttcttctattcaaagaaaaggatatcgaatttgattttgtagcgtcctattctatctattccaagaactttgataatgataatgataatgtggtgattataatgaaggtagggtgggacggcgatggcataaggactaaaggttgagtcaaccattacactcaatttgagatgattgtgtgtatgcacttttaggtcaaaaacacttttctgattgatgctgaaagttcatactttcaatgaaacaagcatataaaacacatttgagtgtacttagtttaatgttacatgacgaaatcaatgactttgatttcaagctttcaaaagtatttttcttatatgatcaaatttgtttaaagacttcgtgaagttaagttttattttcaatcaagtttatataatgtacatcctatcttcactactacataaaacaccttctaagacaccaatttaaagtcggttgccacgaaaccgttttcaaatctgatgcggtggcattttagtaataaagtgaatctttttaaacacgggtattacgaaaccgtatttgaaacatatttttaaacacaggctttctcaaaaaccgtcctaatttggaattattcaaggtcgattttaaagaacccgtctttaaagccgactatatttttctcgtgctttcttgtcgcccgttcctctctatcctctcttcctcacattcctcgacccaagccctaaatcccttccctcttagtgaccccctccctcctctcctccctcgacctcaacggcttggcgtgaagcagggggacacggtggcgcttctgtactcctcggggaagacggggttgagcaatggtgtccggaacttcatcgcggcatcggtgataataagcgagggagcgcggtggtggtgatagagaggttggagttggagccattgttgtgggtcacgaagcacagggtgacgaagctgtgggtcgggcctccgagctgcttgctctcttcaatttccgtcgaaggtcgcggatcttccttccattctcgtgtgctctactctggtaagaacccttctcacactccttctcattttcttcttttgggttagggcaaatgtgccctttctcattcttattcttttgtgcctccacccactataacctcaccccaaaccaccaccaccagcacacgaaacgaactccaccatacaatttctggacatggaaaataagatgtggaatatatatattactggtatgtggaatattattgtttttctgactttgatgtgtttatttttttttttctttgggaaggttgatgagggttatgtcagggggctgcggaagaagttgcagtttgaggagaggaagcaagctaatcaaagaagggtaatgctgctggttttagtgtcattatttgattttgcggatcatgaaaagtaaatcaaatgaactgtagtcaatgaagaaagatgcagtttttccctctttttgtccattatatgttttagttatttttatgtttgtgtgaatataaaattgtcatttcaacttctggtatgatcaaatattgacatctgtgtactgtatttgtagaaagaagttgttgttcagcacctatacttgggaacctttgattactgatgtttgggttcttcaccagagtgatgatgatcagttggtatgtgaaatttttaagtagcatacgaagggaatgtgttgttctgcatcctgtgagtgaaattttgttcattttgatttagatattaccgtgtgattcatgtaggttctggagttaggattgaattttcttaggccgatgatatgagtgcaatacttgtggtgaaactaagaaaaatgttgggctttggaatgtgggcaaaactgcacattacaagaatgcatgttgaagggaaggtatgacaatggaattgagtggggtggttttgcatttttgttagttaacattaaaataatttactaattctaattttaattcttattaaagataagaaatagcaggatgaagaagaaagtttacatgcttggtttgataacatgtttcttgttttcattttttattttttaaatgtaattataaaattgccacttttattttcactttgtttctgttttcaaatatttatccttttaatatatttttttaccaatgttggtttcttggggtattgaaatgatgtgacaaaaatatcaaatgtgttagaaatcttctcatcttttagttgtttctgctattagaaactgttgtagccttttaattattttcctatatttacatgtttgaaatttttgtatccagcttagcatattttaatgataatgtacttatgtgttatttggatgataatgagatgtgttatgcacattggtttgtagttcaaattttgcaaataattaatgttattattcaaatataaataattgttaatttttatttatgtattagcttttgcaccaatgattcctttttatagtatttaacatcaaacaataaacgatattgtacgaagcttataaatggtacaatagtccaaagaaaattatgataactaatctaagacggttatgaagcgcgaccgtctttgaagggcacctttctaagacggtttttagccctaaccgtcttagaatccacgataaaaaaatttaaaaaaataaaaaaacaaaaaataaacccttctaagacggtttccattcaagaccgtctttgaagggtaccattctaagacggttctacacccaaccgtcttagaatccacgataaaaaaattaaaaaaaaatgaaaaacaaaaaataaagccttctaagacggtcctctatcatgaccgtctttgaaggttaccattttaagacggttctagacacaaccgtcttagaatccacgataaaaaaataaaaaaaaataaaaacaataaaaaaaatacccttctaagacggtctccagatatgaccgtctttgaagggtatctttctaagacggttttcgacccaaccgtcttagaatccttaataaaaaaattaaaaaataaaatcaaaacccttctaagacggctggtcaaccgtcttagaaagtcttaggcttcaaagacgttagtatcaaggacgggtcaacaaccgtcttggaaggctgtttagaaccgtcttggaaagcccattctgtagtagtgcttattccaaccgcgtcagtaacttatttcttattttatcatggaaggatatttagctagctagtaatttatataatcttatcgaaggtaaacatgcatttcgttgtcaaagtgcaaacaataatgcaagctgtattacaatacttaaacaacatatttaatcaaaacaatcacattagtatagattaaaatatacagaaaaacaacatatttgattaaatttgtgtagttattattagctggtacatgagcccaaactgttaaccagatgacattaaggttcgaaggacttacggatatatggtccaaatcgcacgtgacaccatagaaaattaaccccaactcagctttcatgcatattgtacagtgcaggtatactggatgctggtgcacatgctcttcaatctataccatacattttgtatttgtttatttgctgcctttaataaacgtggtccaaaagagatttattgtaataaccatatgattgatcagtgttctatatctttctctaggaccatttgccattagttttgacgaaggaatgcatgaccactgatgatgactttaatttgcgttattggaagtgttatggaagcttcaactcttaagtcggcattccttaaataataatgactcgaggacaacttttaaagagacaaatatttatttttcaactcttaaaactggctttgcttaaccaaaacaatatcaacttgagaataattattatggagactatattgacttttactgtttatctcagatcacatatgacactcaaacgactttgacaattaagaaatgtcttaaaaacaggtgcttgtctcctaaaaatcagcgtttgtgcttaatcccgcatataccagaatgcattgatagggtaagaatatttaggaataatgatgattgtgtaataatatttatagattaacattaatcaattatttagaataacttttaattattaaatattttaaattataaaattattaacttaattataacaattgattaattgataaaattaattaggaatcgtggattggaataaatttattttaagggaaaaatgatctgattgaattacttcatttcctattccttgaccattcaattagttttatttcaaaatcaaatctaaattatttcaatttgaactaaattggtttcgatttttcaagagagtaccaatattaacataaattataagatacataaattagtcaactagtaaactgcacctcatatatattttttgaaaggccactacacctcatatatttatgatcataacaaagttcaaaatataaaagctaattaattattgaacaatcttgaatacacaacctaattgtcaaatcgattttggattggatcaatttttaactttagaaatcaaaattcaattcaatccaatgaaaacattttttttaggttttggtttgttcagttattaagatttccgttgaattataaatctgcaaatctaaattaaaatcatacttcttacacattacgtactaaaaacaaacaaaaatataaatcaatgtcattgtaaattattttctactatttacatataaaaatactatcatcaatcccattcctttctcgaaattttgaaaccattcgtaaagaaagcaattttatttttggttcatcaagcaacaatatttctttgtttctatattcattaagaagaaaaaagttatatacagtttaaaaaaatttaaaaaatcatctaatcactacccataataaatatatcataattttattaatataaaataattgttttaaaataattcaaataatgatttataattgaagatattaaattcattaattaaaatacatacttatattgagttttcgtaatatactttaaaggctcatgtatttcacggatacgtattgataaaatattgagtatcgatatccataattggcggatacaaatattcaaagcaaagtaacatatccgtgttgggtcataatcaaaattcacccggcataattaaaagcgtagaaaccctaattgatacaaagtgaaaacttgatgtacataaactatatatatatatatataaaagaaattaatacttataagtttattttttatatatatgttgactcacacacacgcactcaaataatctagtagtacattatttttactctatggtttcttgtaggagtgttcatcaaccgatccaaacagcggtaactgaaccgaaaaaccgataaccgaaataaccgaaaaccaaaaaatcgaaaaccgaaaaaaaatcgaaaattttcaccggattggatcggttttcggattggctggtaaaaaccgatccaatccaaaccgatccaattacctacttaggctttttagttttacatttaagttatgagttcaatttgaaaattagaaaattgtgtttgtttttgtccaatgagcatgtttgcaataaggtttcattactctttattttgttcaatgaacgtgtttgtccaatgaaaattagaaaatgttgtttgcttttgtccaatgaatgtgtttgtttatgctagatactccttattttgataaaaaataagtctctaagttttatttttagacattttaaaaaaccgaaaacctatccaatccaaaccgaaaaaaattggattggattggatcggatttgaaaaaaaaatcaaaccgaatggatgatcaaatgaccaaaccaaagggattggaccggatgattttttgcttcaaaactgatccaatccagaccgcgaacacccctagtttcttgtgttgacattttgtatggctttgtcattgacctatataggctataaacaaacgaaaattctttgagcagtacataaacaaaattaacaaagaaataaacgtctcatcataacacggacaaaacaattattatacttattcacaaaaatcactatcagcacacaaaacaagacaattattgacttattcacaaaaaataatgtatataatgtgcaatgtagcacagcaccgatatgtgataagactactcttcgacacatcaatctcaaaaaattatgaatttcgacaagttgagatatgttttaatattaaataatatttttaatttatacagcatatatttcatttttaatattcaataatttaaaaaaattaaaataaactaataatatttatcaatctaatccctcccaatgctcacgtgcatgcattccgtgctcaattgctccttcatccaaattaaactgataaactaaactatgcatgcattccatgctccattgctccttcatccaaaattgcatgctccattgctccttcatccaaatttgcatgctcttttactcattcatccaaattaaactaataaactaaactgtgcatgcattccgtgctccattgctccttcatccaaatttgcatgttctattgctccttcatccaaattaaactaataaactaaactgtggatgcattctgtgctccattgctccttcatccaaatttgcatgcttcattgctccttcatccaaatttgcatgctccattgctacttcatcatcaatatcaattaccaagacagggatctcaatattaccctccccaaatcccattatgttttggaaaaattcacctgttgtattcctgagcttcaacttctgctttctgtagtctatgtcatggtgattcaagttaatgctcatattccataaatgtgatggaattacattcttgttcctgcaaggaaaattacatgaacatgtaagaacatcattactttcactactacttgattctgtgtaacaaaaaaactctaaaaatgaaaagaaaaaaaaaagattacaagatgccattgtgtatcagatattgttgcaggtcagcaatgaatatcccctagaagagtcctgaaccgtgattttctccaagtcacaatggtgctgcaatgtctcataatgagccttcactgcattgggatgtcggcaaggaagcttttctgatatttcttcccacttttctgcttcgttgtcttgatgattttcccttaaggcacaaataagggaaaaattttcaactacggtccatttcctacatgaaagaaagaaaagtgggtcagagtcagagaaataaagaaaggcactgcaccaagaaaaggtggtgggtcaaataaagacactacacccgttaaaagaaaggaaaaagcatttgtaactaatcgtgtcggggattttggtttattatttaatcccgtttttctttgataagaatcaataaaaaatagttttccacttttgactaaaaaaagaaaatattttgagaagaagtgcgggaggtcaaactgggtgtatataatcggatcactatagaacaactttggaattgtcaatataacggaatgatatcatatgattcgataaaaaaaaatttacatctttccaaattctatcgaaatttttgattaatcattttgatttcatgaccggaacagtgggagatacacgttacaccacgattttgaatcagaagagatatttcaagaaatggcagatctattcttaagataagctccccattatctacgaccccttaactgaccttcatcccccttcgaatgaacaaagtaaactcccctaatgtagaaacggaaaaaaaatttgatgacctctgtggaaaaggtggtgggtcaaataaagacactacacccaggaaaagaaagggaaagaaagtttgatgacctctctaactccattccggcatcatgtaatagatggcgattaaacttcgcttcttcttcaccaactttcattcgcattacttttttttttccatactggcagtatggaagcttaaagcatcaacgggtatttctccatttgaattttcaggatctcatcaacgggcatacgtacttactacaatattcataggatcaaagacctaatgactaaagtaattaatttattcaaaacaggcaaggcccaagaggcaagtaggtatgaaaaaaatgcatacttactaacaatgcaagaagtagtaaacgtactagcacttaaaattcatgctgctttacctaacaattctttggtaaatgttgaagcaaagcagttttttttttattttatttttctaggcttgtgagattttctcatctacccattgtaaatggagaagcaaagcagtctttctctttaatttttatttttctaggcttgtaagattttctcatctattagtatcactgtcattgatacacatttattatttgacaattttacattaagaaaagatatccaatcgaactatgtttttctattttcatccagcatcatgtcagtgtaaacaatctggtctttggcttgaaatttaaaaaaaaaaattgaaacaatttggtattagtgaccaagaaaggaaacccatcaaaatttccacctaaggaaaggaacttgtctaattcctagatgctaggtatatgtgttgcggattagacaagtataccgatcgttccaagtaatataatgataagaaagtatcattcccacgaggattgtttgaccaattaaactataatttatatcgataggttggaggacaagtatttatagaaattaatgttttgtgtgtgtacgaattaaattaaaagctaactattaacataaagtttttataaacaagcaagtaagggttgtaacgatacgtgaagtgaagtagctagggcaacccacactaaatgctccttaccttcttgcaagatccactacattcatccattacaagttactcaatacatgcatcttcatacaataatagctaagccctactcccgtagtgacattaaccctttaacccatttaaataccctaattccttagcaacatctattaggttaagcataaaatgatgtattaaaggattgcaagcatacacttctatccctagataatgtaaagcttgtcactttacctaagtccaagcatagaatcccaatattcctattgcaaaccctagctttcagtacccaactagagtgatcaattccagcaagatagaaacatgcattcaatcaaagtaaagtgaaataacttgatataaatgaataataacatctaatcccatccaaaggaagttacattcagtacttggccctaactacaaaataaaactagccaaacctcattatggttggctttgatacaaaaaatagcatacccagctgaagtacaaggggaagaagatggagaagaacctccacttaagccttcaactcccaaaaccctagctaaggtacccaagctcctaaaaccctatttttgtgattttctccctccaaaagtcgtgcattcaatgctgaggcttcagtatttataatccagcttgtgaagtctctgtttttcccttgacagctttaaattactctgctctgtcgacctctggcgctgatggcgtgagcctggagctgatggcgccaacttacagaacgaatggcgcttatggcgtcaaccagcagagtcaatggcgctcttagcgccatcctggccctaatagcgccaggttccagagctgatggtgcggatttggcgcggttggtgctggcttccagtgttgtggcgctggtcgcaccggtccttctttcaagcttgagtctttctgctgattcttactttaatttgctacgtttgattgatttcctggcaatatcaatatcagcataattcacaacaccaaatggacaattcttaatgcttaatgctcaatttcttgcttctaaaagcttaggaaaccttatatgctaggcgcatatcaaacaatttccagatttagatattgttgtcctagcaataaacaaagttcaagtaggaagcatggatcaattctctagaacaacattgaaaaaaacaatccttgagcttaaaatgctacaaacaactaaaccaattcaaaacttcacacaaagcttttcaaatctatcacacatagcaatctaacttgaatacccctcacagatgccataattcactcaacactctagtgtttgggtattctctcaatccatcacagctctagtactaccataagcttgatcttattctcaagttcctaacaacaagaacacaacacatgcataactgatcaaaaggtcttaaaaagggttgtaacttggcttggcttaaaggtagaagcatttgggaagtgactaaataagcattgaaattgaactttctagatttttgagagtttttctttttcaatctattactcctttcaaaatattctttgtttttcttccttttctttcacattgccatttctttcctttcattttgttggttggcttcaactgaatgcctttctttgtttttcatcccttttcattcttgtaattcaccttgatatttgtattcttttattgcaaaaccacaaatcaattagtggttcaatctcaactagggtaaggtaaagaatgtggcttgagggatttatcaggtgattaacaaaagaagatttcaggctcaaaagggttagcaaaggaaataattgtaaggaagtctatttggtccaagcttattagaacaaaatgcctttatcacatcaatgatgcatgcataagagagaaacagagcaagttctagagtactatcactgtgaggtctctctacaaggaattaattgtttaggcccaaacctcacaggttgtggtacaagctagacttatgatgatgtcaaatcaaacattgcattccatttcgaattaaattcaaccatacaagcattcacactcagttcatgttccatacaacatcatagcagggttcatgtcaccaatgcttccaaaatctaatttacaactgactgattgagcacatctaaatctgggacaagtatgcttttagcaaaaagtgtctaatatgtacacctatggttaggttagaattagactcaaattcaattgtagttactatatgtatggattcacacacaaaaaaaatttcgccaaaaagtatctacctaactgttcatcattcaccaaaaagaaaacgtttcaccaaaaagacgtatgattcacaaaaggtattgtatgactaatcgtttgtttcctcaactaacgttccctattcccagatttaatcaattgctatccccagcaagtgacacgcagaaaaacacaattcacatgatacgttacgagaggaaacaacactcgtgcataaacaaagtactaaatcatggcagaaatgtcatatgtttaggcacgcactgacggtgccacatagtatgcaaaaagtctaaagtagctgaatggaaagtgcaaaggaaaatgacagtaaaataaagcataaagtgaataaagatagagagcgaggaagatcagtgaggctgatcctcatccatggtgtctatgccagctgctgcagggagagatggaggtgcctctggtggtggaagcgcgaacgaaaccggagtgaactgtggtggagaggtgtggggaccaatagaaaaatgattgcaaatcgcagtaagcatccgagtctgatcctcgagttgctcctgcatcctcaaaatggtggtggtctagtgatcaagctgcagttgcatcctcaggtaggtggccgagtcctcaaagataggctcgcgacaaggggcatggctggaagcagagcttcctgctgtggcggtggtgacaccgctggctgtgggggaactggtatctcaggcatgggctcctctaacccgtcgcgggatgcgtgcctcgggcttctggtagccatctccttcgggggtgagcttagaagcaagaataagctgccttgaagagcgtacttcactgagtctgggtaggtcctaagggtcatagaggtccccaccttcacatccctaggctcatcattggggatttccacacctgcgtgcatgcagaggtgagaaatgagcgaggagtggcctaagagcgagcggctgttgccgtcctggatcatgtgcaaaatgcgatcagagaggacgtaggagatgtctagattaatctccctctgcaggacgtatagcaggcacgcacgctccacattcacatccgtcaggttagaagacgggaggatggtggagttgacgaacagatgccagaagtttgattcaggatgtagctcttgcctcctgagcttcttcgggacactgtctagaccggtcttcatcttccatgcggagaagagcctggtgatacctcggcgtagcttatcagctaactgcggcatatcatccctgtaggttgccttgccagtgcaagggagaggctgcattgtgttatacctccgcacgaacccacagtgacagaggctgtcatatgaagtgtgaaggaagctctcgatgaattcgtggtcaaaggggacaaccacgcctcagacccagctgcgcctctgctcttcaacagtttttctgtccacattggccagaaattccttcaatattgagctggaactaggttcagcaaaattgaccaatgtctgtcactggcgtcgagtgataacgtccaggataggggaatcctcaggcagagcttcccagtcaattcgcctctccaagatgatctttttgggcagataccatttgttgaaacggtcctagtgctccttggactggaagcgccttcatcaaagtcagttgtccttgggcgcttactgctggctcctgtattggctttctttttacccgtgtccacctgttttccctgaaatgcaaaagaatccaacataccacatgtattccattaagctttttcatacaaaatatggtacaaaagctgggtattaacaattcccagatttagtgggaaccctgtagttagcaatcatatgcaaggattgctcaaagaattctatccagcaaattggtgcagagctagttgtccagctgagggcatgcaagtgaacaaagatgcagacaacccacaacagtattataacaaaatgcataagacatgatgcactaggattcctagatttagcatgaaaaccatggggcacaccaggacttttcaacacaataagaagtgagcaggcactatttcaagcacaattcccatatttgcttgaaactatattgttaaaatgatgtatacaagtattcctaatgatttcaaagattttatccaatgcaagggaccaaaaggaaccggttacacgtcccacaaatagtcaacagcaaatgttcaggacactaaatgtaatcacaaggatcacattcacatgcacaaacaattacaggattcatcacatatacatcctcacaccaaggttccatacatttatgccttcctatttaagcactggtggtcaaatgcagaatcactatgcataattcccagatttagttacacacaatctctgcataatggtcacaataaatcactaagacatgcttagtaataggtttaattcaagcatcaacatctagggtgtggtttgtaatttcacaaattgagctaacaaaaacatgaacaatagctgacaattaatccacacaccatttggaaccctaggatttgtaagccaaggagactaggggtatacccaaccagaaccaaatcaacacaattgaataggatagcaacatgtcaaacacaacattatgacaagcatagacacctagctcttcatagaaatttatatccacaggaccaattgatgaggaccatacaccatataaatcaaaatataaatcaatgcattacccacagcagttgaaaggaacttagaagcaaaatgaagctcttgcatcaacaagcaatacagcctaaggaaagccatgaaaccagcaggcgctggcagcgcgagcttcacgctacgcgcgtgggctggaaatgagccctaacccattgcagaattgaggtgctcagccctagactaacaatggcacaatcaatggcacccagaacctagttgagagtgatttttaccttgtcacgagccatgaatgtgaaggtaaactgagagaatgcacagaggaaacccacgagacacgaacaagcacaagctggagtggggagagagaacatgctcagaagagagagtgagagtgaatgagagtagagggtaagggagatgaaaggaattgggagaggttatggattgtgggggaatagaggagataagagtgagtagaggtcgaggtgatttggggaagtgagggaatggcgtggaaaatttcaaaatttgaaaaaaaaaacggtgccataagtgtcgcgcgactcgcgcagaatgccgcgctgtcagcgcgagctgtaaaacaacaaggggaattggcactgacagcgcccacctcgcgctaagggcgtggaactccagtagcataggcgctggtggcgccgatacgactctgatagcgcaggaagccagagagattgatgctgatggcgctatctccacgttggtggcgccatggcattaattgaaactccagccagcgctggttgcgccagaatggcgctaacagtgtgacattccagaaacactggcgccagtagcggtgctttcacgcggattgcgcgggacttcagtaggtttggcgctggtagcgccgtatccacgctagtggcgccataccctcaatacaaaatgcagctggcactaatggcgccatgaccttagtagtggcacaaaatgtcaaacattggaccctaagcctaggaaaaccaacaatccttaaataatttgcaaaataagaactacattaccatgcattgataagaaacataaacaacaacaacaagcactgaagaaatgaattctttgaattacatgacaactaaaacagagaaagcaaagccaatctaatctaccctaagaaaaagactcaaacctatgacattaaagtacacgattgagttgcctctcaataagcgcttgtttaacatcacgagcctgacggttaatcctcaaggattaggggagcacagagggattgcaacaacatccctatcaactgggccaccaagatatggcttcagccgccatccattgaccttgaaaggtctattggcatctaggggagtaatttcaattgccccatgaggaaataccttaacaaccacaaagggtccagaccatctagatttaagcttaccagggaacagccgcaaccttgaattatacaataatacttgctgccccggttcgaactcctttagatgaatcttcttgtcatgccacctttttgtcctttccttgtatagcttggcactctcataagctgctactctaaactcatccaattcattcagttgtaataagcacttttcatgagctttggtgagttcaaaattcagaaatttagtggcccaaatggccctatgctcaagctcaacgggaaggtggcaagacttaccgtataccagctggaatggtgacatacctatcggggttttgaatgtcgttctgtaggcccaaagtgcgtcatacagcttcttggaccaatctttccgtgagtttcccacagttttctctaacataacacacacacatatatatatatatatatatccaatcacttaacatgtgattcacggaccctcactaggatccctctcggcctaaccaaggcctcgagtctctcctaagactccgctcaggctaacacaaagcacatccatgccttagccttaccatgtccaagctcaacgatacaactcaatatcagctcatggacaactcaacccctttctctacacatgcataactcagccaaaatcaaatttcatcaataatgatttctaaaggctctatcatcatcacaacaaccccctgaacacaagtctctacaagaccttgggctaattccaaccccatcacaaaagggtcactattcatgcaaactccccaatctcaaaatcaaacggagaaacttgagtttcttacctcaacggcgtcaaagaagaccctaggaccacctcctcgagctccggtgtccttcccacgcaatgggtctcagccacactcaagttctctaagctttcacttggggatttcaaaatctcactcaaaggggtttttgatgagaaaggatgagtgattcaagcttcccaagtgtttctctcacaatcaaaagccaaagggatgtgttttggtgaagaaatatggcttaaggaagcttgggatggtcaacaatggaggtctagggcagaggaagaagaagaagacactttctcttcagtttttcgcattttggggtttatatactcgctctgcccgacccgcggcgctcccagcgccaaactccagaaaccacggcgccatccgcgccacctccagcgcctctagcgccatactccagaaactccggcgccctcagcgccgcatctggctccccaagcgccactttccagaacctctggcgccctccgcgccatatctggcgccatccgcgccggctgggaaacttgacgcccctggcgctgcacttcagaactcctggcgccggcctccagaaccccccgcgctcccggcgcgaacctggcgccaccttccagaaaccatggcgccacctgggagacttggcgccccaggcgccacctctggcgctcctggcgccacatcccagagaccatggcgccctcagcgtggacccggcgctcttggcgccacactccagtgctctggcaccctcagcgccagacctggcgccctcagcaccgcaacccttacagggttttctgctaaatgcgccctataataacctatgttttgtataaaaaggagtaaaagaaataaaaacttaaatttataaaattctgtcgcaaaagccttagtgacggaattagcgacggattagcgacggattttcacgacggagtctacgccaagagcgccagagcggcgccaagagcgccacatgtgctggaagttggcgccaagagcaccatagatgctggaaactggcgccaggagcgccagatgcactgaaaggtggcgccaagagcgccaaggtggtgccaaggtgagctagttgatgcagttctgttagaagctcataaaagccagtttagcattcatcctggtgctaccaagatgtatcaggacttgaagaagaagttctggtggccagggatgaagaaagatatagctgagtatgtgactagatgtctggtatgtcagaaggtgaagattgagcatcagagaccgtcaggcctactacagccattagaaatcccagaatagaaatgggatagcatttccatggactttgtgatgggattaccgaggactcagactagatgtgattccatctgggtcattgtggataggctgactaagtctgctcactttctgcctgtgcggacagattactctgcagagagattagctcagctgtatgtcagagagatagttagactacatggagttccagagagcattgtcagtgatcgagatccgaagttcacttcaagattctggagtatgcttcaggaggcctttgggactcagctgaggctcagcacagcctatcatcctcagacagatggtcagacagaaatgaccattcagaccttagaagatatgctgagggcttgtgcgttagagcaaggaaccagctgggacagatacctacctctggtggagttctcatataataatagttttcatgcaagtttgggcatggcaccttatgaagcattgtatggcagaaggtgcagaactcctgtatgttggaccgaggtaggtgagagacagcttcttggacccgaaatggttcaacagacttctgagcagattagaatgatcagagataagctgatgaaagctcagagtcgacagaaaagctattatgatcataagcacagaccgttgcagtttgaagaaggtgaccatgtgtttttaaagctctcccctaccacaggcgtaggacgggttatgggagtaagaaagctgagccctagatttattggtccctatcagatattgcagaaggttggaccagtggcttataggctcgctctacctccccagttatcaggtttacatgatatgttccacgtgtcacagctgaggaagtatgtagcagatccatcacacgtggtagaacctgataccgttcagattagagagaatttgacgagtcctacaggacctgtgcggatcttggatcgaatggagaagaagatccagagcaagaccatccccatagtcaaggtacaatgggaagggaggacacctgaggaggcgacttgggaacgagagcaggagttgatgcagctataccccgagttgcttgacaggtatgtctttgaattttgaggacaaaattcttaaaaaggtggggagaatataataacctatgttttgtataaaaaggagtaaaagaaataaaaacttaaatttataaaattctgtcacaaaagccttagtgacggaattagcgacggattagtgacggatttagcgacggattttcgcgacggagtctggcgccaagagcgccagagcggcgccacaggtgctggaagttggcgccaagagcgccagagtggcgccaagagcgccagagtggcgccaagagcgccagagtggtgccaagagcgccacagatgctggaaactggcgccaggagcgccaaagttgcgccagatgcactgaaaggtggcgccaagggcgccagaggcactggaaagtggcgctaagagcgccaaagtggcgccaagagcgcggcaatgtcggtcaggccccctatataaagggatttcgcgatttttcggaaaaaatcactgttcctcttcctccttgagcccaggcagccattagagcactttaggagcttcatatctccattataagccattaaaacacctcctaatcacctttaaacctaattggaaccagttgaaagccaaaatccagccttggttgtgagaattgtgagaagaatcccattctttgagtgtcaagagaaagctgagctttggagaggaaaaggagctggtacaaggacgccagagctaggagaaagacttctccagtcttccttgattgaattaaggtaagaaactcacgtcctaaccgtttaattcttggaatgggagattgggtgaatagtaaccaagtattgatagggctggaattaggcttaggttctttagagagatgtagtcaggaggttgttatgagtcatatggcatattgaaactgaaattgtgatgaagtttgagtttggctctggaaaaggaaagggtgtgtgaattagcaacattatggcctgaattaacttaagtacctttacaaaagttattcataaggccaaataatcggtgaaaatgtggttatttatgtggtttggctaagttgagccaatgtaagttcttaactattagaacaatcttacattgatttatacagagttccaaaggaactctgaagccttgaggaggctgatacagaccactgagggtcaatgtatgacctaatagaagttgagttaagataaaaccttaagctagatgactttgaattggttataagtggaagggtgtttccttccatatacacggttgaataccgttcctgatgatttgattcatgcctattgtagggcgtgaagcacagattactgctagagatcaccaagatactaggggagctgtttctgagctacgaccaggtaagctcagtgttattggagtttgtttctcctacttgtgtttgctccacccattttgggtgtttgttgattatgactgtatgctcatgccttgtggttttatgatatggaatgatatactagatgtctaatgattgttgtgatactggatatgattgaaatggctagatattgctagcaaacgtgcattaaccaagccctgatgaagggtatgtgtttgtatggttacaatgaaataatgtatgttatattgatgatgataatgatgatacatgtattgattgtactgttattgtttgtaatctgctggccagtacactgagaaactatggaccccttttgggaacgtacccacgagtaggtggatgatctcccttagggcaatccataggcgtccttctaagtcctgattagaggtacccacgagtaggtggatgagcctagtcaagcacagatagattgagttttgagtgcatgtattatagagatgatgaattcatgctaggcactgtagatgcctcttgatcatgttatgttgagattgagatattatgcttgattacgttatgttattaatgtatttgttatatctgtgtatatgggttgtaaagtaaaccagggggagggtaacctctgagaaccctgagtttactgagatagttatctcaccccggtttggggcttatgttgcaggaacagagtctgaagtccctgagagatcccaaggcaagaggcctgcactgggatagttagaagacattaggcctagatgactggagcctgttggctccctttttttgattattttggttgtattttggtaccctgaggggtcatttgtatagttttgagcagttggcctgtatatgacaataattcaccatatatgtataaaagtatttatattctaatggatttatgcttcctttactgttcttttcccatgcaagctgcgttactctgatattgtataatgttaatacgtcgggtgcacacgaggtgttacacgccctttcgaatcatcgaaacatgattatggccttaatcctagggttaattacatgcttaaaacttagggtattacagattaaaaatgcgtacaacaatgacgatgtgcgtgaaagcggcttattttgtgaaagaagctcgacataattgaaatcacgatggaataggatccacccagcagtagaaaagtttaacgggtgctacaaacaagcagataggcaacggaaaagtggaagttcagagaaggattgtatggctaatgctcatttgatttactcgtaggatacaggtaaaaaatttgaagttgaacaacttggttgttgttgaaagatcaaccaaaattcgatgcaaaatttatgtcaaattttttaaaaagaacaaaggtttctgtaggtggaaattactcgtcgtcttctaacactgagacacccattgaagccgaagagtatgatgagccatcgccaacgtctcgcccaatggggcaaaaagcagcaaaaagaaagagcaaaggaaaagaagcttctagcaatatcgatttatctggtatagaaagtgtaataaatgagaagaatgcaaacacattaaaactcattcagttaaaggaagagcaagaaaggcatatgcagtatgaaatcctcatgaaggatacatccaacatgtcagataaacaacgcgaagaccacgaaaaatattgtgagcatattaggaagaagctgtttaattaaagtttagtccatatctttgaattagttgttattcatttactatgtatccagttattaacatgtaggttataataccctaaggactggcgcggttggcgctggatttcgcgcggttagcgccaggtccctttatgagaaaactgtgtttgagttgtggcgcgatcagcgccagacccactagaagttgacgctcagggcgccagacccacgctagcagcgccattgggtctggaatttggcgctaatggggccaggtcggcgctaggggcgccagagcttctggaatgtgacgcctgaagcgcccaattggcgcgaggggcgccatcagttttgcagctcgcgcggataacgccaggggtggcgctggtggtgcaggaaggagcctggaaaacccattttctctagttttccacgcgatcagcgccaggtgtggcgcgggtagcgccacagcctctggaagttggcgctgatggcgccagtggtggcgccaaggacgccaaagtttctggatttccgcactgggggtgcaaggatggcgctgttggcaccataaccaccgccattgtggctcggttagcgccagagctgacgcggatcgcaccagacctttggcaggccacctataaaaggcaatttgcatttttttcagaggaaaccactattcctcttcttccctgagcccagaccaccattgatgcaccctaagagctttaaaccttcatcataaacccataaaacacctcctaatcacctttaatcttcaattgaaccacttaggagccaatttcagtctagtttggagagaaaccccattccttgagtttcttgagagagagttgggttttggaggggaaaagaagctggttcaaggacgccagagctaggagaaagacttccccagccttccttgactgagttgaggtaagaaactcacgtcctaaccgtttaattcttggaatgggagattgggtgaatagtaaccaattgactgtagggatgaaattaggcttaggttctttagaaaagaataatcaggaggttgttctgagagatacggaacctagaaactggaattgtgatgaagtttaaatttggctctgagaggaagaagagtgtgtgaaagggaggtactagggtctgtatgaacttaagtacctttacaagagttgttcataaggccaaataaacggtaaaaatatgttgatatatctggtttggcggagttggacaattgttggttcttggtattagtaaagctttgaattgagttgtacagagttttaaaggaactctgaggccttagttagactgaggcagaccattgagggtcaatggatggcctagtagaagctgggctaatatgaaccttaagatagaagacataaattaatgaagaaagagtgtttcctttcatataaacggttgaaaaccgttattgatgctttggttcatgtctattgtagggcgtgagatgcatatcactggtagagatcaccacaagactaggagagttgattctgagctgagaccaggtaagctcagtgttcttggggaatgtttcccctacttgtgttcactacaccctagatgggtgattttttgatgtatcttgcatgctgatgttgtatgatgttgtatattgatataggtattagatgttgatgaaatatcttgatagtatattggcaattgaatgctagctaaaccctgagatagggtatgtttgtactgattaccttagcataaggtatgcttgtatggattgttggttatgagataattgtaatgatgatgttgtataatgtatatgcatgagaattcactagctagttgaataaggaactatggaccccttgggaatgtgcccttaagtggatgatcttccttgggataatccatagcatccatgtaaatcctgagagaatgtgcccttaagtggatgatctttctcaggtgttgggcggcaagtcctgagggaatgtgcctttaagtagatgatcttcctcaggcatggatagagcgagtcctgagtagatgtgtctttcagtagatgatcctattcaggtactcagtggaaagtcctgagggaatgtgcccttcagtgaatgatctctctcaggcaaattttgttgattgcatatgtttgttttggggctgctctgtgcatgtagcttattcatgtgagccgtgaaggctgattgtatgatgaagttccatatgatatgatttttgttatgttatatatatatatatatatatatacacacacatttatatgctgggaagtgaaccagggggagggaaacctctgagaactctgagtttactgggatgattatctcacccctgtgtggggctcatgttgcaggaactgagacaaaggtcgccgagagatcccaaggcaaaaggcctgagctgggataatgtgatggaagtccctaggtttagatgattgagcttgtcagctcacattttgatgattttgtctgtattttggtatcctaagggatatttgtatagttttgagaactatgtaccttgtaaatgacagataatgcaccatgtatgtatgtaaaatgggtatttatattggattcaggcttcctttattgtttatgattatgcttgctgcgttactctgatattgtaataatgataatacgtcgggtgcacacggggtgttacataggtccttgttgtatcaaataatgaaaatttgattttatgaaacaagttgttagaaactagtcattgaaaactagccgttgcaaaactagccgttggaaatgaagctatataaatgtctaatgtttcatcattttcacatgttctcatacaaattacgcaatatatctatctcatttcaaacacttcagataccatataatggatccaaacatcgatttgcatgaagttttagatcaaatgataaataaggaattggaagacaacaccgatcaagacctcattaggttgatacttcaaagccaacaacaactacatggcaacaccgtcgggtgtatgcaaagaaaaagtggtacgtcgaaatcgtgaagaaggtcatgatcgattgttcaatgactacttttcagtaaatcttgtgtacaaggagaatcaattccgactaagatttcgtatgagaaggcatgtgtttcttcgaattgtagatgggctcagcaatcatgatgagtactttcaagagagattcgatgcattgggttgaaaaggactatctccattacaaaagtgcacagctgcacttcgtattttggcttatggctcacctattgacagcgtggacaaatatgttcgaattggtgaaacaactgcggtggaatgcttggagcgatttgtatcaggaatttgcaccatatttgggaatgagtacttgaggagaccaagtaaggaagacatcgaatgactactacaacttgagcggcccgcggatttccaagtatgttaggttctattgattgtatgcactgggaatggaaaaattgtcctgttgcatggaaatgtcaattttgtcgaggtgaccatcgcaacccaacaatcattcttgaagccgttgcatcacaagacttgtggatttggcatgcattttttggtaccgcgggttctaataatgacattactgtgttaaatggatctaatgtgtttgatgaagttttgtcggcacgtgctcccgcagtgaaatacatagtgaatagaatccaatataatatgggatactatttagtcgatggtatttatccaaactttgctacatttgtgaagaccatctcaatgccacaaggagaaaagcgaaaattatttgctcaacggcaagaatcggcaagaaaagatgtagcaccagcgttcagagtgctctaatctcgattcgcaattatacgtggtccgtcacgtttttgggatattggtaaaatgaagaatatcatttatgcatgtatcatattgcataacatgattgtcgaggacgaacgtgacacatatcaaagtaatattgattacgataatgtaggtaacaacacgtcaacattcgaagtatcttcaagtgctcaccctagtatcagatcaacataccttcaaaggagagcagaggttcacgacaaacaaaaacaccgacaactccaagcagatttagttgagcacatttgggaatgtttcggaaacgaaaataaccataactaaatttatgtaattttttttaggtctagtttttttatttatttcgatgttgtagtgtttaattatttattattatgtaaaattttattttatattgttacgtatttctttttatttattttaatttatatttatgaaaattgaaaaaatattaagttttattaaaaaaaatataaatatgtggatttttttgagttccttgcattggagcaaaatattaggcgagttccttatctgtgacatgacactgtggggaccacaaaaagttgcttaagaaactcatttaggtttcttgcattggagatgctctaagatatatcatgacgtggagctggcgtggcgtttaccattgatcagaataggaagtagctagtacatgcatgcaatattagcttaatcataggcgacaacattaagtactagcattccaccacaaaaagtagtaactttgatctttttctttgtttcccttcttgaaaacttaaaactaaaccaaatatgtgaatggaaataattaacaaaaaataggaatcaagcatttaaattaatttcatatttttatttttattttcacttcctgtcctcaattttgttttttgtcaaaaaaaaatccattgcatagaagaataactaattaataatcatctgatcaatctttttaatataataagctaaaaatccttgtacagattatgtaatgtcgaaaaatggatttgttgcattccctcaatcaggcaatcgtaaatatggattattaatgagcatcaaatgatttatattttaactgcttatattatgtctgatttatgaattcaaaaaatataattccttttatatttgtcaaacagtcatcgttaactgattgcatgaatgcatcaaattctgatagtaaataatccagatgttgtgatgatcatcaatcaaaaccaatcaaacaaccaaatcagaaccttctttggtggcacatgatcccaaaaccaaaaaccctttctcctcttgtttctcttccactagttttttctcttcactaggatcagaactagtgagttccttagctcgtaacgcttgaccctcccaattggtcctagccaacacaaacatcatcgtcacaatacacgacccttgcgcggccaacatcccaagccacaaccctgcaaagaaccccaccacaccgcaacaggcatgcccacgaggtagaagcaacccaagtttatgttcgcccccaatttcggccttgctgtccttctcaggacaccgcacaccatcgtctggggacagttcccaatttcgcagagcccaataattggcaacaccgccgtcgtcaaagcaatgatttccccgtcgagcgtgaacatcgaagcccaaacattcctcactgaaacagcgaatgccaaagcagaaagcccaaacacaaaactgaagcagaggccgacaatcaccgcgagtttcgccctccgaggattcctggcccccaactcgttaccaacgcgtgtggacactccgacactcaaagaagacggaaaaatgtaaatcaaagctgttgtttgaatcaaaacccccatggatgcaacactttcttgagggttaactaataacccgcagagcaaaatcataatttcataccaccaccattccagacaaatggaaacacagctcggaatcgctagattcaagagcgtttttcatccgttgaagcactcgcgagaaacacccggccatgttttcttgtgcgtgcctgaaaccactatataaataatcaacagccctacgaggttgaggtttgtgataacggcacttagcgcaacgcctttgattccgaggttgaggatagacacgaagaggtagttgatgggcacgtggaagagaatcgaaacgacgacgcatcacgtgagagggagtgttattgattggctccgaaggtagattctcaaagggtgtagcagcgattgcgatacaagatcagggagggagtaaaatatgtagagttcttcctggttggctatgtcttgttcttggtcgcaaaggagtaatattttcttcatgttgagccagaagaataatgacatgaggcaggaggttatgaggagaaggagaacgattctctgcatggtgaggccgagaagtttgaatcttttggcgccgaaggcttgactgcagatgggttccatgcccatggcgagtccagagagaacaaagtatcctgtgatgttggcgaagccgatggctaaggagccacctgcgagagcgagttctccgaggtggccgaggaagagcatagagatcatggagcgggaatagagcaagaggacagtgaggatcatggagaaggatatgtttcatattcatacttgttgtataattctgtcagagtcggcaagcggcttcctgggagggcttcttgggaggttagttgttttacaaaaccttaaaaattgtactacaggtattaacaacacatggttagtgactcctgaatcaatgatccatttatcactacaattctccactaagcaagcctcaatcacaagtaaattacccataccttgttggtttatacgtgggcagttcttcttccagtgccctttttgaccgcacttgccagttggctgcttttttgcaatttgtttggcaattggaatatctgactttttcttcttcttattcttgttacctcccttgggtttccccttaggtttaacataaccttcagcaaaaaatgcacttccttgcttgactaaagattgttcaacactctcaagctagtgcattagctgagtaagatccagtttattataattcattctgaattggttgaagtaatttggtagtgattgcaggaggaggtcaacctttacctcatgatcaaacttaatcccatggttatccgctagtttaaagtttgttatcattattaaacaatgatctcacacacttccaccagtcatcacgattttggtgaccgcaaccaacacattctgcctagttgaactgctaggagtagcaaacatgccatcaagagtccagagcatttctgctccactctcaagcatgtttacttgctcctgcaagtgactaacgagactaaccaaaatgtagcagcaaactgtaacattcgccttctcccaatcaaaaaaattattttttgttttctgagaagcatttactttaggttgtgctgacttaggggtaatcagaacaaagttgagtttctcatattgcagaacaatatccaaattagttttccattttttgtagtttgtaccatccataggcttgtaacttaaaatagtagctaacagattgaaagacgacattttctataaaattaaagcacacaagttacaatcatacaataaacatactagttgcaagtagattccttaactacttttgttcattgttacaattctttaattatccttacaagatttacgttggataagtcacttgtaaaaaactgaaattgttatttggggcaaaagaaccaaaagggtgtttttttaaaaaatatttaccgataaggtgcgctttcgaaactatttacaaatctggtttgggaggggacttatttacaaatctagtgctgtgcaacatgcctggtccaggcatgttgcagtgcaccagatttgtataaatagcgccccccgcttcccagttccttcgtgtattggcttccagtgttctctgtctctgctaaactgccatcattctggaattttttcgttttttaagagatttttgaaggtgttttgagtacctagcctctacgggcctgggggcgctgccccccggacccccaccggggcggcttccccggacccccgcccgctcacctgggagcgggaccccagttggctttctgnnnnnnnnnnnnnnnnnnnnnnnnnnnnnnnnnnnnnnnnnnnnnnnnnnnnnnnnnnnnnnnnnnnnnnnnnnnnnnnnnnnnnnnnnnnnnnnnnnnnnnnnnnnnnnnnnnnnnnnnnnnnnnnnnnnnnnnnnnnnnnnnnnnnnnnnnnnnnnnnnnnnnnnnnnnnnnnnnnnnnnnnnnnnnnnnnnnnnnnnnnnnnnnnnnnnnnnnnnnnnnnnnnnnnnnnnnnnnnnnnnnnnnnnnnnnnnnnnnnnnnnnnnnnnnnnnnnnnnnnnnnnnnnnnnnnnnnnnnnnnnnnnnnnnnnnnnnnnnnnnnnnnnnnnnnnnnnnnnnnnnnnnnnnnnnnnnnnnnnnnnnnnnnnnnnnnnnnnnnnnnnnnnnnnnnnnnnnnnnnnnnnnnnnnnnnnnnnnnnnnnnnnnnnnnnnnnnnnnnnnnnnnnnnnnnnnnnnnnnnnnnnnnnnnnnnnnnnnnnnnnnnnnnnnnnnnnnnnnnnnnnnnnnnnnnnnnnnnnnnnnnnnnnnnnnnnnnnnnnnnnnnnnnnnnnnnnnnnnnnnnnnnnnnnnnnnnnnnnnnnnnnnnnnnnnnnnnnnnnnnnnnnnnnnnnnnnnnnnnnnnnnnnnnnnnnnnnnnnnnnnnnnnnnnnnnnnnnnnnnnnnnnnnnnnnnnnnnnnnnnnnnnnnnnnnnnnnnnnnnnnnnnnnnnnnnnnnnnnnnnnnnnnnnnnnnnnnnnnnnnnnnnnnnnnnnnnnnnnnnnnnnnnnnnnnnnnnnnnnnnnnnnnnnnnnnnnnnnnnnnnnnnnnnnnnnnnnnnnnnnnnnnnnnnnnnnnnnnnnnnnnnnnnnnnnnnnnnnnnnnnnnnnnnnnnnnnnnnnnnnnnnnnnnnnnnnnnnnnnnnnnnnnnnnnnnnnnnnnnnnnnnnnnnnnnnnnnnnnnnnnnnnnnnnnnnnnnnnnnnnnnnnnnnnnnnnnnnnnnnnnnnnnnnnnnnnnnnnnnnnnnnnnnnnnnnnnnnnnnnnnnnnnnnnnnnnnnnnnnnnnnnnnnnnnnnnnnnnnnnnnnnnnnnnnnnnnnnnnnnnnnnnnnnnnnnnnnnnnnnnnnnnnnnnnnnnnnnnnnnnnnnnnnnnnnnnnnnnnnnnnnnnnnnnnnnnnnnnnnnnnnnnnnnnnnnnnnnnnnnnnnnnnnnnnnnnnnnnnnnnnnnnnnnnnnnnnnnnnnnnnnnnnnnnnnnnnnnnnnnnnnnnnnnnnnnnnnnnnnnnnnnnnnnnnnnnnnnnnnnnnnnnnnnnnnnnnnnnnnnnnnnnnnnnnnnnnnnnnnnnnnnnnnnnnnnnnnnnnnnnnnnnnnnnnnnnnnnnnnnnnnnnnnnnnnnnnnnnnnnnnnnnnnnnnnnnnnnnnnnnnnnnnnnnnnnnnnnnnnnnnnnnnnnnnnnnnnnnnnnnnnnnnnnnnnnnnnnnnnnnnnnnnnnnnnnnnnnnnnnnnnnnnnnnnnnnnnnnnnnnnnnnnnnnnnnnnnnnnnnnnnnnnnnnnnnnnnnnnnnnnnnnnnnnnnnnnnnnnnnnnnnnnnnnnnnnnnnnnnnnnnnnnnnnnnnnnnnnnnnnnnnnnnnnnnnnnnnnnnnnnnnnnnnnnnnnnnnnnnnnnnnnnnnnnnnnnnnnnnnnnnnnnnnnnnnnnnnnnnnnnnnnnnnnnnnnnnnnnnnnnnnnnnnnnnnnnnnnnnnnnnnnnnnnnnnnnnnnnnnnnnnnnnnnnnnnnnnnnnnnnnnnnnnnnnnnnnnnnnnnnnnnnnnnnnnnnnnnnnnnnnnnnnnnnnnnnnnnnnnnnnnnnnnnnnnnnnnnnnnnnnnnnnnnnnnnnnnnnnnnnnnnnnnnnnnnnnnnnnnnnnnnnnnnnnnnnnnnnnnnnnnnnnnnnnnnnnnnnnnnnnnnnnnnnnnnnnnnnnnnnnnnnnnnnnnnnnnnnnnnnnnnnnnnnnnnnnnnnnnnnnnnnnnnnnnnnnnnnnnnnnnnnnnnnnnnnnnnnnnnnnnnnnnnnnnnnnnnnnnnnnnnnnnnnnnnnnnnnnnnnnnnnnnnnnnnnnnnnnnnnnnnnnnnnnnnnnnnnnnnnnnnnnnnnnnnnnnnnnnnnnnnnnnnnnnnnnnnnnnnnnnnnnnnnnnnnnnnnnnnnnnnnnnnnnnnnnnnnnnnnnnnnnnnnnnnnnnnnnnnnnnnnnnnnnnnnnnnnnnnnnnnnnnnnnnnnnnnnnnnnnnnnnnnnnnnnnnnnnnnnnnnnnnnnnnnnnnnnnnnnnnnnnnnnnnnnnnnnnnnnnnnnnnnnnnnnnnnnnnnnnnnnnnnnnnnnnnnnnnnnnnnnnnnnnnnnnnnnnnnnnnnnnnnnnnnnnnnnnnnnnnnnnnnnnnnnnnnnnnnnnnnnnnnnnnnnnnnnnnnnnnnnnnnnnnnnnnnnnnnnnnnnnnnnnnnnnnnnnnnnnnnnnnnnnnnnnnnnnnnnnnnnnnnnnnnnnnnnnnnnnnnnnnnnnnnnnnnnnnnnnnnnnnnnnnnnnnnnnnnnnnnnnnnnnnnnnnnnnnnnnnnnnnnnnnnnnnnnnnnnnnnnnnnnnnnnnnnnnnnnnnnnnnnnnnnnnnnnnnnnnnnnnnnnnnnnnnnnnnnnnnnnnnnnnnnnnnnnnnnnnnnnnnnnnnnnnnnnngaaagcgcaccttatcggtaaatattttttaaaaaaacacccttttggttcttttgcctgttatttggactttcagtgccattactagagcctcgatgggaaggttaataattttaccaaatttgaatgtaattaaccatcatttcatttcaaaaattatccttagtatccaaacattgccgactttgggtcgtacaataatttattaaaatttttgaatttgttgagatacaattaaataaaatctggtcattcttattagttggggtttcacatgaccattttattaatggacccacaatggagctcacaggtttaaaaaataatattttagtttaaaaccttcactcgttcaatattttgttacaaggaatttaaaaaaaaagtccaatcgttaatctagaatttgaaattcataatgattattaatttgaatttaaaataattaatccaatcattaatctagaatttgaaattcataatgatcattaatttgnnnnnnnnnnnnnnnnnnnnnnnnnnnnnnnnnnnnnnnnnnnnnnnnnnnnnnnnnnnnnnnnnnnnnnnnnnnnnnnnnnnnnnnnnnnnnnnnnnnnnnnnnnnnnnnnnnnnnnnnnnnnnnnnnnnnnnnnnnnnnnnnnnnnnnnnnnnnnnnnnnnnnnnnnnnnnnntatatatactcaatatttttcctcgacactcgacagagatctcactcaactcaaccgcctccactctctcacgcaaaccattcttctctccctttgagcctttcatcgctcctcggaggtacctacctcaaagattctttctttttcatttccttttaaataaatgtctaatattttttcttctaatttaagtttcagcatcgttttctaattcttatttgatccatttttaccttctttcgttttttttaaaaaataatcttctagttgtttttctctctccatctgtgtttgtgttgcttttattgttatacggtttcagtgatggctgattagggtttgctcgttcatctgccatgtttgggatttagggtttttagagagaaaaaggtttaaataaataaaaatcatgtttttatggtttattataaattataaaaaaatattgttattattctagtttttgggttgtttcaaaggaaagattgggtgttggaatgcttttgtcgacaaatgtctggttactgtaggtcttggttttttagtaatggagggctatggttaattgcattttggtggtgtgtgtattctttttaatgatggtttgttgttttctgtaatttttttttggaataactatgtatttgctgtctgttattaagatttaagagtgattttttgtgttgttgtcgtgttgcagatatggcagcgtcggaaggatcaccaacccctcagatgattggccatgcttttgtggagcagtattactccatactgcatcaagagcctgacctagtccacagattttaccaggactctagcatcctaagtcgtcctgaagaagatggtaccatgacaatggtgactactactgtggtaagtacaagcaatgaatggagtattggttattgcaatggcattcggagttatatgattgcagatttagcatgcgtttaatggaatttgttttaaactgctctttttaatttctcatgtcctggattgtcaatgctgagggtagccatttgcattttctatttaaagtggttatttgtttgaaacatgattctatgcataatatatggaaagcaccctggattatgtgctcttcatgagaagggtggtgccatattttaaaatttttagtatattattaattattattagcatgcacagtcaaccggcaacattctttggtgagtgtaactaactaccacccctagcctgtgttttaattttacagtttttcctttttttgactccaaagagtagttaacgttcattctttgaagcatttgaaatcatgtgtctacagcaattccttttttaactgccaaaggtcatggctatctgagtttatttgggtgaacaagtccaagtgttttgtgttttattgctttgactaatgtgatttgtgacaaataatttaacatctgctgaaatcaatgatcttacttcttgctttggtgcaggaaattaataaaaagatactctctctggattaccctagctttagggtggaaattctgagtgctgatgcgcagccttcatacaaggatggagtaattgttgtagtgactggctgcttaactggaagtgacaatctgaaaaggaagtttacnnnnnnnnnnaaagcgcaccttatcggtaaatattttttaaaaaaacacccttttggttcttttgcctgttatttggactttcagtgccattactagagcctcgatgggaaggttaataattttaccaaatttgaatgtaattaaccatcatttcatttcaaaaattatccttagtatccaaacattgccgactttgggtcgtacaataatttattaaaatttttgaatttgttgagatacaattaaataaaatctggtcattcttattagttggggtttcacatgaccattttattaatggacccacaatggagctcacaggtttaaaaaataatattttagtttaaaaccttcactcgttcaatattttgttacaaggaatttaaaaaaaaagtccaatcgttaatctagaatttgaaattcataatgattattaatttgaatttaaaataattaatccaatcattaatctagaatttgaaattcataatgatcattaatttgaattcaaaatcttttttttaaaataattaattcactcattaatctagaatttgaaattcataatgatcattaatttgaattcaaaatcatttttttaaataattaatccaatcattaatctagaatttgaaattcataatgattattaatttgaattctaaacataatgtcctgaattcgcttattatttccataatgattattaatctaatagttgggacataataaccattaataaaataattgaaattcaaaaacgaccattaactaggtaacgatcataaatcttaattttctaaattatctcattattgtcataataatcatcaatcaagcagttttaattctaaatcaatcaaaattattattaacataacaaaatatatgcatgatcaattaatcactaataatgtgatatgacacaaatattttatatatgacatgttatcacatataatctatctattcataaaaatggtaattgtaaaactttaatccttggtttcctaaaaaataaaaaaaaatctttgtctccctttgctgttttttgagttaatctgtcatggacctccaatcacctaacccaccatatggatagaatcatcattgagagaggagcacgcggccgtttgaaccacaggaaaaagacgcagtcttttaggaggctctggttattcttttcatcgttttctgtcctctttcacgctatgacatcatattgttcataaaaacttcggatagtcacgaacagactcaaacagtgacagatatacatcttttggatacaaaaattgaacctttctatcttacaacgataaaattgctaaacaaaaagaaaaatccaggaggaaaccagatcataagggaccaacctccttgttacatatccaaaagaaatacattcaaatgttctaccatgaagtaaaacacatatttataaaaccatacaccttatgaaaaaattataaaaaacatagcatatgtgtaatccaacataaatatagaaccctatgtgtcatatcacataaaagactagatcaacatcaaacgtacaacctagactctgataccaattgaaggatttcaaaaaatttgcggaagcatattggacctagtacgtttaaatgttataagatcatcattgtctttctaatcgaaaggagataattatctcttgaagcgtgaatgcaatctcctcctttttctttggtgagttttctcttgacctcctcaatcgattacgaatggcaaatcttccgtactatttcaaataagggaaatggaaaatgtgtggacacttttctattttagagagatgatgacaacttttgtttttgtctagagcaaataagattattatatataggagactaagaaaccaaaacctaggtctctcaggcccttggtatacacttaagcccaatagcttttgtataaagagcatttccaacaaagagaacctattaaagcattatatggggagtaaaaaaaataaaaaggttagtgtgcgtgttgtaaacacaaaatgaggcgatttgcataacattcctaattttcgacttcttggcagctttcacactacgacacttcacttaacatccttgttggtcaactctatgtaattagtcctttttgagatttcgaagattagctttgactacttccagatcaatgactgaccccacaaaccaatacgagactttttagcgtgctttgtcctcactcacatgctttttggaaaacttgcctagaagtcactcatcacataactactcgaagtcaaacatgcttcactatgaaattcttaagtgatgaactactgaaaaatagatgcatcctgttgatataggtaatactaattaattccttcaagtcatattcatccgtacaatctcatacatgcatagcctttggatccttctcattctggtgtgattcgaccagggtgtcacaatttgcatgttggtggaaaaaaagaaatgacagacatataaatgagtaaaaaagaaaaacaataaaatcctaatttattttaaaaaagtaataaaaaatttgataaatatattaaagataaacaagaaaaaaatatagaaaactagaaacaaaccttttaaaaaatgttactaagtagcgtttccaaaaaatgctaaaaattactgaaaaactactaaaaaaatttacttaccaaacaaccaaatgaaattttcaataataaaaaagttataaactaaatgaaatgtcttaccaaacaacctaacttcaaatcaaattaagaactttttagtaaaaaaagatttaaacattaatttctttttgtctacatgcaacttgtatatataaaaaaattatgtaacgtgtaatttttttctaatttcttttttggtaagtaaatcttttataattgatctttcttagctttctttaaaaaataattgatctctctaactcacttgatttgtctaatattaaaaattaaagattaattgcaaattaaattatgattttctttaaataaaaaacgtctcaaattttaaaaacaatttattcataataaaatataaaatccaatcaaatttttaaggccgtttgattgtcatatctcttgataagattcaaaattcaaaaatatcatatatatatatatatatatatatatatatatatatattaatcaatgtgttatttgttgaagcacatcctatttgaaacacaagacaacataacacacaagcaattgagagaaacttcttaaaccaacaaagttgggcgtcgtctcagtgataaaacgaaaccaaacaatgctttaataatattcccacgagccagaaaacatcgtaacaaaagttggggactatatatatactcaatatttttcctcgacactcgacagagatctcactcaactcaaccgcctccactctctcacgcaaaccattcttctctccctttgagcctttcatcgctcctcggaggtacctacctcaaagattctttctttttcatttccttttaaataaatgtctaatattttttcttctaatttaagtttcagcatcgttttctaattcttatttgatccatttttaccttctttcgttttttttaaaaaataatcttctagttgtttttctctctccatctgtgtttgtgttgcttttattgttatacggtttcagtgatggctgattagggtttgctcgttcatctgccatgtttgggatttagggtttttagagagaaaaaggtttaaataaataaaaatcatgtttttatggtttattataaattataaaaaaatattgttattattctagtttttgggttgtttcaaaggaaagattgggtgttggaatgcttttgtcgacaaatgtctggttactgtaggtcttggttttttagtaatggagggctatggttaattgcattttggtggtgtgtgtattctttttaatgatggtttgttgttttctgtaatttttttttggaataactatgtatttgctgtctgttattaagatttaagagtgattttttgtgttgttgtcgtgttgcagatatggcagcgtcggaaggatcaccaacccctcagatgattggccatgcttttgtggagcagtattactccatactgcatcaagagcctgacctagtccacagattttaccaggactctagcatcctaagtcgtcctgaagaagatggtaccatgacaatggtgactactactgtggtaagtacaagcaatgaatggagtattggttattgcaatggcattcggagttatatgattgcagatttagcatgcgtttaatggaatttgttttaaactgctctttttaatttctcatgtcctggattgtcaatgctgagggtagccatttgcattttctatttaaagtggttatttgtttgaaacatgattctatgcataatatatggaaagcaccctggattatgtgctcttcatgagaagggtggtgccatattttaaaatttttagtatattattaattattattagcatgcacagtcaaccggcaacattctttggtgagtgtaactaactaccacccctagcctgtgttttaattttacagtttttcctttttttgactccaaagagtagttaacgttcattctttgaagcatttgaaatcatgtgtctacagcaattccttttttaactgccaaaggtcatggctatctgagtttatttgggtgaacaagtccaagtgttttgtgttttattgctttgactaatgtgatttgtgacaaataatttaacatctgctgaaatcaatgatcttacttcttgctttggtgcaggaaattaataaaaagatactctctctggattaccctagctttagggtggaaattctgagtgctgatgcgcagccttcatacaaggatggagtaattgttgtagtgactggctgcttaactggaagtgacaatctgaaaaggaagtttactcagtcctttttcctggctcctcaggacaaaggctactttgttttgaatgatgttttcaggtatgttgatgagtataagtcagttgatattgagtctgtgccagcaaatgatgctgctgccgctgatgaaagtgctccgacagatgcttttgttccagagcctggtaaatcttctattacatgctggttatataaaatataggatcctttcatcttgtttttcattttcttcctctaacatttgtttttcttgttgtaacttgtaagtttaggttttaaattttttactttgactatgtatacagaggtcattcatgttgctgaagatgctcctgcaagtcaaactgctgttgctgatgctgacattagcgtcagcaaagaagtgaatcaaccactggagaatggaaatgtatcagttactgaaaaggtggttcctgttaatcatgttaaagaatctagtcatcaggaacataatcattctcatgctgagaaagctgcttctaataataccctggaagatactccaaagaagtcttttgcatctattgtaagttttatttatttgtttaaatgccttcaatatttttttttttttgtagtgtctgacccatatgtgactatttgcatttattgatttaaggtgaatgcactgaaagaaaatgctgctcccttccatgtgagggtttcccccatgaaaattgttgaacaaccacgtgtttctagcatacctgcaccagaagcaccagctcctagcattgaaagtccaccagaaaaaaatgagaatggaggtgggttcccattctggaacgagaatggttaattgtgtacagagtttattataaattgtctcattgatctggatgtctgttgtaacttctgtaattcattttccacaggcaaggcttatgcaatatttgttgcaaatttgcccatgaatgcaacagtggaacagctggaacatgctttcaagaaatttgggcccattaaacaggatggtattcaagttagaagtaataaggttagtctgttacaagcatttctgtgattttttgtttatatagtgcacttcaacaacttccaagtattgatacaatgctttgctcgtctttccagcaacaacaatcttgttttggttttgtggaatttgaatctgccacttcaatgcaaagtgcacttgaggtattggcatgccttatatctaccatgttggatttctaacatttttgattttgcattatttttgttcatttagttgagtttcttaatatggaggtgttgtagatgactctaaattatttatttatttttgaaacttgaaattctttgacattcttctatcctagtttctttcgcaaaagcattattgcaagtgttatacagttcaatgacctctgcagttttttgtttttgttttttgcatgtgttatactgcgacgagctcttttcaagtaattatagtgaaatagatacggggtaaaaattgtgggtttctagaatgtggttttctgcctgtattagtactttggtgtcaacaggcgtatttgtttgggccctataaatgccaacattgatttgacaaagtgaatgctctttccccctaattcttgggatgtgttgctctgcgtgtttattctacatatgtattttatcggttttcgatatagttcatgtgcttacactttttcttggctaattttgcatgtttatggttacttttgttttatttgagtcctacatttatctgccatttttctatttcaggcctctcctcctgttaccttggatggccgaagactttcaattgaagaacggcgaggtaagtcagccatatttttcttgtcaatataaacttttcaaaattaagttgcaacttttgtttattgttttctgtgatttcattttccaaccgacttatgctccagatatgctgcataacagttgctggcatcccatgtaaattctataaaaataagtgaaaatgttaggtaaacttgctagggagatagatcttgtgtaatagtgaagccatgtcactggtcacggactcgcagtgattataacacttgtcgaattttgcgcttacactgtgtattattgtttgttgcacagctaataatgatagggcgaggtattcatcgggaaggggcggttacaggaacgatagaaatgataacttcaggggccgtggcaacttcggtggcggccgtggtggtggctatggaaacaggaatgatagttttgagaagcgaagtgagttctctggccggcctcgcggaggtaataataacggtggggggcgtagcaatggagaagctgtgccaaggagttatcagaacggaggagcaaaagtcactcgtcaatcagtgaaagttcagtgaagtgattcattttgttgggaattgagtgacaacggcattttcttatagatagcggcatctagagggattggtttgcgactgcattagagtctttttttctttttttctctttttcttcttatttattcctttattatagtgtcatgatccttttgcttcagagttttttggttaaatcacatcattccccatacatacttccccccactagtttcttttctggtttttgcgaattttgttacattttgcatctattattccggaataattgttttggaattggccacaattatgctatttttttagaagtcctatgcttcttgtttgtctgttgcatgtgggttttcttgggtgttgagaattttttagagtatattttatttcccgaaaatcttatctatagaaacattgttcccaacaatgaaatatagttttattcttttattaaatattgaaaaattttgtttttctatttttttggattcttttattgaacattggatttttattatattattattatctattgaataaaatatgatgtcattttaatatttaattgaatattgttaagtataaaaaatattggaaaaagggtatcttaaatatttttaattttatttataaaaatataaaagtaaaattgcaatttnttttttttttggaagcatgttttggataccaaatatcatttaaaatgaaagaaatataatatattaattttatcttatctaatattcactcaaaaaatttagttatgcactggcgtggtttgcactcctaaaatccacttcaagaatgattattctgaaaatgaaaggcttaactgtcaaataattaaagattcatctaattagatgtttaaaagatctttgttaacctatcatcatcaatattattattataaatgtttaaagatctcaattattatttcttaattatgatgtcacttgttaacctatcatttttaatattattattatgattgttattattatcagtgtcatgattgttgtgtcgttctaacattactatgaatgtaatcaccaccttcaaatttgattagagttaacatgctgacagtagtttcaacagtgtcttctaaatagagaatttgcattggtatagaaaatcataatgtctctagagactttgttcattacttcaaaacaaaatttgtgtcattgaaattttattccgtattgttagtttcgtaacctttaacaagttaacaaatttatttctttgatgaatatcgttagttatgttttgtaaggtaagaaagggataacaaactttgactgtgttgttcctccattacataagttgatacagttaagtaaaagcaatatgaccttgtgaatgcaaggcaaaaccttgtatttttctggtgaaagttttacaagtaccaccatgtaatcgcattgcaccttaatatgcatttctccgactattgaccgtttttactaaaaatgtaaaagattaactttctaccattttgtgcgcttacactccctatagagattgtacaatatacctatctgaacaattcaaaacacatggtgcccactaaacaaagtcttaagtctagttcttgtacaatataactatcccaaacatttcaaaacacatcaacacattctgttttattttattattattaataattaacgaaaaatgcatttttttctcaaatggaaacacaaacagttccacaaaccaatccaaatgcaccaccaccttaaagcaatcccagtttctttgtaaagtcgtaattttgatctgaaggtaaatataatacgtatcaaaagggaccacctattatctacattctccccacacaaggaaaaaaggttttgaaaaactgtttcattagaatagtgtctgacttagtgaattgagagacacctgtggtctctgatttgggacaaaaaagaaaaaactattgcattctcattgtgtgaagataactaccaagatataactcctccccaaaatatcggtaatgcttttgagttatctgagctcagacatctgacatctaagaataattcagatatctgctttggccatcgtagttctcccactagaaacatcatgaagtaagtttccgagcagcctctgatccaaaatcatattaggaacctggagaccaagctgaaaggtcaggtctgtgcacaaggacagacaaatattaacataggataggaagggaataccttgtctccgaagaaaatcttcgtattattagcaatggcctgaataaatttaagctgaagaaattcaggggtgagcttcagcctgtttgcttcagcttcctttattacacttgaagttgcaaaaacaataaaattcatttttttccccaagatcatatatattataatatcttaatcataaacttgcatttagcaaagacatttggaataggaaaatctcaccggtagaagtctgcatctgccaggctcttttcacgtgccaggtacattgcattctctatttcttcttgtcgtctagcactatccttctccaataatttttgctccataaggatcttgctaacattggcattcttctcggcctcactaatggccatcttcttcttagtctctgcctccttctcggctactttctgtttctcaatagctattaagacctagcccataacatccaaagcaccttgcttaaacatcatttagaaaagagaagagctaaaactaaaattaaatgaaggagaatctagcatagaaaatcctgctagacacatttatgggactcaacaaaagatacatatctcagagaaatgacagtacaaatcaatcataaggggaaaaaaggcactgatatgtgcatgtgctcacacatgtttaataaccctggctccttcaaatatcaactaagttttacatatgtagctccacacatattaacatgacagctcttcttaatggaaacataccttagtacgctcctcttccatttgttcgaaattgcgtcttatgctttccggaatagttggctttgtgacacggacacttaagatctcaattccaggagcatagcgagtgcagtcaacttgaagagcatctttcatcttttcatcaatctgcaaggatcccaatgatagcattgttaacatgttttttgagacaacaagaaaggagaaaaaccagaagccaaaagatgcatattggggtaattcatatgatacaatggaggaaaagaatcacaaggtatgaaatgaaacaataaaagcttgagacttgcataaactccttttcagcggatgacaatagaagctaaaagttactaagcatacatcaaactgtttcataaaatccaactatcatcttattcttaataaatgggagttaccagtttaaaataaagtatggctgtatataaaatataacctgatcaaagacatcaatatagacttgttgcagagaatgagaactgcagaactgattaatctcatgatgaatcttgtcataaatccatgtcttatcataatgtacaccatagttgagcaacgtctcaaagacaaattccttacggagccgattcacaacctaaaagaagaatatagtaatatacatcactgctatgaaattattcaatatgtgaaaaaaaaagtaaatctgagattacataaaaaatattcgctattacctcaatcttcccaaaactgatcataacaccacctttagtaccgcagggtatatctgtcacctgcaatagtcaccataattcaaaaatacgaactacagagccaaaagaaactgaaatccccatcctgaacttgctctaatcaacttaccatgtccgtctgaagtgtaacttgaacaggttcatactgagttagaaaaggcatctttagatggaaacctggaaaattaatacccagaatgtgaagcaaacctttttgctagtatacattgaagaaaacaaaggagtatttagcacctggctctgtaattgttttcagaagggcaccacctctccaatatacccccacatgtccttcagggacttggtgcaggatggataagctattttggaaggatggtgatgctgaaggcagtaaaacctgtagaggaaatcacatattaagcttcaaaggttgagaagaatcaatttaaatatattttccaatggtaagaactagtacaacaactaaaccttatctcactatgtggttcagctacatggatcgttatcaaatactagacttttggaaagccagattaattcagtaaaatagccaatatagtcaaaattgataaacaagtcaaaaaaatgaaaatcataagcagaatatctttattttctgaactgatcttctacccaaaaaaatagtaagcaaaaattaatgttgaagcaacaacgaatcaagaccaatagcctattcattatcatttaatttcagcgagttagaaccttccaccattcctcaatctaaaaaaatgttagcaaataattgaatgttagtgattacattcactttgtgaaagattaccaactcatttagtatatcaaattttacgtaacagctaatacaactccacgaaatgatgctagttagtacactttttagcaatagcacataatataaaataaaaatgacaggaaattatgtacaaatattccaaagacactgatacaagttaaagaaaacatcaaaatcaaagtatcgaaaaaaaagaagaaaacatcaaaatcagagattcagaggcaaaccaattaataaccaaatcagataactgaagcaagtgattaatcaatcgataaaggattatatacacgaatgagattcagcgcaatggcattgcagttctacgacactatctgttcccaaacgacacgaaacaacgaaggtgcaacgagctcaggcattgttgtcgtttatcgagaagtggaaaacgaaaccgagattgagagaaagagagagagagggagagaggtactaccagagcgacaatggcgaagaacgagaggatgatgaagagaatggcggtggaatcgtggccttgtcgcggcggcgacggaggagaagccgctgttcggtgctgcgaatccatggcggtggagattcttttttctctctctttcctttttccttttttatattttagattctttgcggtttgtttggggtacgaaaatgaatgtggcgtgcttcacttacaaataacttgttggacagcgtagagtaatctcactgcttcaatcggaagccacattctatactctgtttgtttgttccgtccgtcttctaaaaccggaaattcgaaaaccaacttttgaactaccacttgaactgaactatatatatatatatatattgagatgagatttatttatatcggtgtaagaattgatagttttataccatttaataattttttattggataaatattttacaaaatacacccttaaattgaaaacttatatcatgtagatcacatgtttcaaatttcatattaatccgaaatcatttgaaacctaattgataatataaaaattaacgtaatatgtatttctaaatatgtggaaattagattatttgattacattcttattgatgtttacattttgtgaaatttaagatatgtgatctacatgatataaactttcaatctaacggtagattttgtaaaatacttattcaataaaaaattattaaatggtgaaaaactaccaattcttacactgatgtaaactgatcctatctctctctatataatataaactttagagttaatatgtaatgagtgagttaactttttttttaaataaatgtttttatataagtgttttagtatataagatttacttattaaaataagtaaaaaaagggcaaaaaattaaatttaatataaattaaataaaaaattagtaaaatggtgtaaggtaatatttaggaaaattgtgcattctattacgcccaaatggggcgtgtttaaacacgttcaaattgggcgtatttgtgcacgttttgacacttggcagcatgtagacgaggcgcggtgtgaacgaaaacttcggacgaccataacttttgactgagatgtccgattgagacgaaatcggtggccacgtaattaaatgttcagtatttaaatcctaattgactattgaatatgaaataaatcttattaaaaagagaatacttaacctatatataaggtctttgacgaaaattggttatcatttaaggcattaattattttgtattaatataatttcatgaaaaaaaaaagtcatctagtatttgaaagaatgttaaaataaataaaatgatttttaagtgtataacatatgtttttaaatgcaacatatgtttttcattcagacaagttaggattacattgatgaacagatgcttattaaattgatgaacagatgcttaaaagccaaaaatgtcatatcatgttaatgtgaaagaatctatttagtactaccaaaaaaagtgcgtgttaatgacacgcgagcaaattggcgtgaagttgttgctaaaagtggcgatgaacattgagtggcagagtggcagttacctggaacaacatgggacaggcctgacataaaatacatattatccactttctcactctcacacaagccaccttcaccttagcctctacttcttcctctgcggtttcaatttcagttgcttgttacaattacaatgctattactattcccacctcagtctcagttagcttcacaaactcgcttgcctttgccttttccctcccgtaccctgaaagtcaaagtcaaactgaaggttgtgtccgaagctgatgccttcccttcatttcttcccaaagaagttcacagaatcgaagacccttttgctcgaaaccttgccatgcggattcacagacttccagtttctgtaataacacttacataaagttatgcatgtgtcgtcattcttatttactcttgctattgctaatgcactacatagtttattatttactatatatttttgttttaatttatttcaatttaatccaatgggttttagtggactgggagtggcagcactctggtctttggaaatgcacagaatctcttctttcattatgcttgtagggcctatttggataagcttattaagaagcaggagaagaaaataaaagaaaaagaaaatgaaatgagcatctccataaactgaatttagctcacgcttaagctaaaaatcaccctttagagaagttataagagagtttctattgattagcttatgcataagctaattttaatttatggaaaagttcatttcattttaagagtgcttttggagaaatttgtgcattatgctaacatgttgagttatccaataatgaaattgaaccaggtgtgtttggattattggaacacagtgacattaatttggaattttggatggtttaaaataggatggaatggaatgtaatttcgtctgtttggattaatacctttaactcctgagactgagactggtgatggctatgttaggcacttaggcctctagttaaggtgtaaagtaggagaaatggaactaggccaaattcatgtgggcctgcctctgttaatgaggttttataataggaagaattagtgatggaagttgtgtactgttatgaataaggaagttgagagcagtagtctgtcataacttataaataaggaagtaggagagactgagagaagagcctattataaaaagaagtggcagaaagaagagttatgcttgtttggataaacttctcgataaacacttatagcagacaaaaataagaagaaaaaaatgaaataagattctccagaagctaaaattagcttatgcataagttaatttaatttgtagaatctctctcatgtgaggaggagagaccagacctctagaagttcctgcaatgaaatcataaaaaacaagttcctgcaatgctattttgttacccttttatctcaactttctgttttcggttggaattctttgttccagagaaagagtgagggtgttatcttcaataaagactttccattcttctaatttttattattttctgatccagttcctcacaggctaccctctacccattttaatatggtcctaacgacagttgtttttctatttccttcccaatcacccaactcttaaattgaatagcagcaatgatttttctaattgtgggatcttaaaacatatttctcctatgttcttaaccaaactaaaaggggttttatgttggtagatgatttcttatgtagacaagtttattgcttcattggagaaggtctttatttcacatgctaggtctccaggcttcctaagattttgcaaccagtcctaactacttaaacctgtcgaattagacgatgttttgcttcctaacatgtatgaactctctttaattctctcttccttcaaaatatagtttatcttccaaatttccaagagtagcagaaaagtatggctagttatttgagcttggtcacttgagaaaaattgttcaatatttgagaaaaacattgttaatcctgtaagtggaaatcatggattcatggtcactccttggtgatatgtgtaaatctactctactagtttttaaatgctcattgtttattccatatgacccaatcaggttaggttctctgaaaatcctatcatgagtagttgtgtgaagccattgatgcagaacacggcgaatccagttgtccttctacatggttttgacaggtgctcaaatcatgcaagatacagaattagtttgtacatttttatgctcaagttacctttagatttcatttcactccttctcattgttcagctcatgtttagaatggagatacacatatccattgcttgaggaagctggttttgagacatgggcagttgacattctaggttggggtttctctgatctaggtatgatttattacttctcctatgctatgttcattcctttccttcttcattttaatcatgcattcttctctttttcctcttatatccatcagaaaaacttccttcatgtgatgtggtatcaaaacgtgatcacttttatcaggtacttgaatgttaattaatgcatctcttggatcctggactttgtaatgatatttttggtcggcttcattgccagtgtggctattgtaaagttgtatataactctaaaaagtatacttgttaaattgttatccttttttttcaaattttatgaattggggtaagaaatcatttatagagataggcttttacttgttcatcagccgatcttctgaagaaatggttttctccacacattgacaaatttgttttgctcctcttttgttttacttcctattgtttcactatgtgttgagggtcaattggatttatctaccagttttggaagtcccacataaaaaaggcaatgatattggttggtccaagccttggctctgcagttgccattgactttgcagtcaattatccagaagctgtacgtgctatccgataatttaatttctgaatatttaacctatcttgtgaagttttgttaattaaaaaattctatgaagtgattttgttgtgatctggtcatttatatgcagttcattttttcaggtggaaaagcttgttttgattgatgctagtgtgtatgcagaaggaacaggaaacctagcaaccttacctagagtagcagcctatgctggagtgagtatatctccaacttaataaagcattaaaccatagccacatttactagcaattatctagaaaatcatgtctctatttataccaatgttctctagtttaagctgaataaatttatgtgtatatttaattatctagaatatcatttcatattctgtctatggaaatttatttgaaataattcattttatcctactaaaatgaaattcaatttaattgatttttcattttattttggttcttcgcataccttcaagtaaatatatcatttaatctggcatttttgttttctgaaatgacatctctctctttttcttagacatctgttattcttgttctgccatcttgtaagtcaatataacataatgtattgagcttggatggctcttgacctctttgattgagtcatttcttattttgacctaaaataaagagttgttgacttaatttcaaattgaaatatggtgaaattatataaatctcaaggaggaggaactctacttggagagactaagttctactcacagaaatggagcagaatgaattaaaagtaagcaagaaattgaacaattagatttgaatagacagattctgctctccctgtcataaatcacccaatcctctaaaataattgttagactctgcccctctcacatcttctttcttatcattttctttagtcttgcatagcatccttcaactatcgaatttctagtattctcatcttggcctccaacacataaactcagtttcacatctctctatgttaagctcaggccttatagggaggtttcagttgttaggaggattaatcacacgctgtttactctattttatggtccattttatctcaatttggtgtggtggtggcttataagttataagttgcagtcactcaatacagctaaatcaacctaattttccatgtctctcaatttaagaaggcttttgggttatgacaccatggaggcaactctatcccatggctttgagactgatgatcctgtccctattgaagcagaagttagttacatgtgtgacacagaagtgtggataacaagtaactgaatggctcatttcttggaggctaagccaattgaggaggtaacttgggaagatgctgatagtatctgcaatcattcccttctttctgccttgaggaagaggtagttttggttgatagtagtgatagtacttttgggcataaaaaaggttcaggttgggcctaaaaaggccctacaagtttacacccataggcctagtattaaatattagcttaattgtaattagaaaaaattacataggtaagtgaaggaatgctagttagagaaagaaaaagatttcgatacgatataaaaagaaatctgtgggtgcgtgtgagcaagtgtgggggaggggtgggacacattttttatcggcttcttagcttttaacttggctgggagcaagcattgctcttacatgattgcaatactttttttatatctacaatcaatacaaatctcccttttactagataggaattgattagtatcattatttgtacaattgtacattgttcattgattttatttctacaccctttcaagttggagcatatgggttttatgaaccaacattcttgcatatgcctttgtagtgtctccaacattcttgatttctctttccaactatggtttatggatgccacattatatttaggttaatttcttcaagcatgcttgtttttaacaagcttagatattttaagctttatcttgagtgggtggtaaatattatcttcttttatttatgtttagaatttgttatgttaggcttagcagctgttaggatttagttgcaaggtatgggacttaagtcccacactggaagaatggattccaatgtggggtttataaagcctcaggctctccaattacaatagctagcttttgttgtgtttttctcccaaggttttaacttcttatcaattggtaccagagctttcaaccatgtgtcttagatacaaacgagcggcgtgggtggtgacgccaacattgagtgttcgcccgggactagtctaagggctagtgcacagccaacctgggtaagactggggctgcagagcgttgtgggatattaggatccaattggaaggtacgagacttgagtcctacattggaagtatgagattctaatcaggccttgagctctccaactaaaacagccagcttttgtggtgtggttctcccaaagttcttatcagtagacaacagcgttattggtttgagtttgtgctagtagtactacactaatacaagacacaacataaacagtataaaaaaatagatgtcaatatttggccttattaattattatgcatcctttttcaatctaaccgcgtattgttattattcatagtcctgtttccactcccttttcctacctataccttgtaattggaatagatatcttgagtaatgctttgtttaatctcttctctcaattcttttttacttcttttgtgggggagagataagaatgatagcatgagattgttaatgtcttaaaatggtggaagttatgctcaccattggctctgttttgaatcaggtatatgtattgaagagcattccgttacgcttatatgctaactatttgagcttcactaacttgactttcagcaccagccttgactggactaatgtgagttgccagatcctaacattatcactttctttagaaaatgtggttgcatattttcaatttattttcaagtccataatacaccacttggcacgtgcacgctttgacacctcagcatcacaagctaaggcatattattgtttataggtagcaagagtccagacataatatatttttagttataaaattgttagaaatataatatatggtttattggatgtaatagctatatagagtgcatcacactgaatggcacccatacacggttatctttagatgttgcagaatgaagttaggataacatggtctttgtataatcttatatagattggccgcttgcattgtttattgccattgtgggaagatgctacggttgattttatgactagtggtggttataatgttgcctcccagatagaaaaggtatttcctgcatttcaagttgacaagtgttattatgttgtaccctattttgaaggcatctgaactatagacacccttttaacatggatgaatacttcgaaataatatgcctatgaagcatatacatttgataattccatgagttaatgtattcctttgatgtagacaacttaaggttgtccaagaaacatttttctttgacgtactctgtgtctctgcccccctccccccttccgaactactatttgtccacttctacatattcgttgattataaaattcgttatatattctcatcattcactagtcatctttgctgtagatgaagaataatacgtgtttaatggaattttatgtctttaatttcattgatatttagttccacatttaattcttttatctccaatattaaatcagttttaccatctttacatttttgttcttcccaagttttaaagggcttatcttttaaaaaaataaggtttaaatggggcacaccttaaacctttttatgtcatgaatcttgaattcctcctgaccaagaagctttgatactgaattgtttaacaggtaaagcagaaaactctcatcatttggggagagaatgatcgcataatcagcaataagcttgcagtggttagttagtacatagcacaatacttgtctatgacatgatgattaacacaaaagatattacatgacatgctggaaaatcttgattttgaaatataattctctttatttctgttatttgactgctaggagactatattgcctgctaatactatgagtgcagttgacttgtgaactttttactctttcagcgactgcattgtgaattacatgatgccattatacgccaaatacccgattgtggtcaccttcctcatgttgaaagaccagattctgttgtcaagttcattgttgaatttgttcagagcaaaaccaagacagaaaaggaatgtgtttcacccgtatgacaaggaagcatgctctgtccatgttgtagttgtgttggacactatccctgttagacactttaaatatttctagttgcattttttaattttttttgttactcttttttctcaactttactccattacaaaatagaaatcacaaaaaatagatatactatagcattttattatgtattgaatgattcatgctaacttttaaaacatcaattctctcttttgatctaagatttgtgtttatgttaattttatacctcttatatacattgtaaagccatggtgtttcctatacattttaaaatttgttgtattgtgtgtacgtcgtatcatatcaataatcaatatcatgtgttatatctacttttctagtatgaaagttgagcatctttttgtcattctctatcaaagaagacaacagaacagttggcctttcgggaaaaggagccatcaattatattgcaaagtatatttgtggaaagggtaaaatatgttgtttttgatctatgaaaacttttggtaaaaattggtattagtcttcttactttaattttgattaatttagtctctaaactttagaaaaatagtgattcttgtccctcatcataggtcaacctcatcatatatggtaaagatagacgattgaaaaccattattatttttatataaagtttaagaaccaaattaataagtttcaccggaaatacaaaaactgaaaacatattttaccttttgtggaaatatcctgttcccttactagacttatagataggggtagagcctcatagttgaatggtatgcgtttggtatgttatgcagtgatcgattcttttgaatgttgatgagttttgcttattgaccccaaaacactaaaatatgtcacattgaagcatataaactttcaacccaaaagtattagagtaactttggtacaagatcttgaacaaggattttgagttcaaactctgatgtttattaaatttcccaataaaaaaggtaaagagatttctaatatggagaatgaattcttgcaaaagaatctttaagatttccacattgttaaaaaaaataatttttttttctctttctttctccctaagatctcaaaatgagatctaccattaaggaacaaaatgggaggaatcttaaaagatcttcaatcctacatgacactgtgaagactaccaaaaagtggtctaagatctcaatttgagatctaccactaaagatgacatcattcatattgaggaatatcaactttcaacggatacttattattcgaatataattcttaatagttgtttcttcaagattttgttgagaatgacacttcccattttttgtgtcattaatttggacgaaaggatcctcgaaagcaatccgtcattgaaaatgtttgtgacggtggcaactggcaacatgattattgagatgggtaagatagcaaaatgtacagagttgctgtgagtcatgcttgtcttgtctaccttaacctttagttattttctggctagggtgttaaacaggttcgaaatttgaaggaatcattctaagcataaataagtaccaacctcaatttaaataaaaaaaaaggtaccaacctcaagttattggagtaatcatgcacagtatctctaggaaaaagtcatgtaacgatttggctaatgtttttatttagaaaataatatatttgttgataatataaaccaatttcctatatcaataaaaaaaagaaattattattgcccccattataacaaaaataaaataaatttagttggatttttcaataattacttaaaagtaatttctaatatgatttctgattaattgaggaaacatataaattaaactatactttttcccaatccgaaaagaaaaacaaaatacatggatcaaatttctataattttaagtatcaactttttggataagcttttaaaaaaaatcgtgaagaagaagcaagttatgcttgttcatgatttaatttaaatatattttcatttatctatttagagacaaatgacttttaagtattttaaataatatttccctatttcgtttgcaattaaaaaaatggctatataaaaacaacatgtactgtatgtttttttttatatttatttcagatttgtcggctatgaatggcatgatgtgaaactaaaattattctaacttgttattgacttttattggcaattacgtccaaaggaaaaattgttccattgatgaatgaaacgccacagcggaaagagaaagtgatagaaaattcacaagtgacctcgtattataattgattgatacagtgacctttgaaccaccactgcttttctttaatgtgcactggttctgttggaaacttagcattttcaaaaaccatttgtagcgtcttaaagtagaaagagtaccacggcacctagttttttctgtagatatacagcttagtaataatatagaaatattagacaagtaaataattcataaattattaaaatgaattatgataaataataaattttccctttaccaatgagggaaaaatgacgattaagtttcaaaataaattgtaacaacaacaatggaagattaaaatttctcatgttacatgagataatatacaaaaaatacagnaaatacttcactcaatcataacatttcctaaaatcaaggaacattatattttatccagcaacaagcgaagggaagtgcatgaaatatatgttttgattgtatttttttattaaaaaaagaaaaaaatttaaccaaaaactacttaattttgatgtatagaaaaaaagcttatctcatataatatgagaaactttaatcccttcaacaatatacctcaaaataacattaatgtgtggtttgaataatttgtaattctaccaaaatcaattccaaaatttcaaaattacgatgaaggtcaaagtaataataaccgtttcaacttttttactatagtattgaaagtcaaaattaattctaggaggtattcaaccacaattaaatgttaattgttagtgaaaggaattaaaatttatgannnnnnnnnnnnnnnnnnnnnnnnnnnnnnnnnnnnnnnnnnnnnnnnnnnnnnnnnnnnnntatcaaaccaattttataatcttgatacccaaacatattattaaggaagtatacggtaagttcctgcctaaataaaatgaaacactttaaatagtatggtacaagagcttttaactagtctttgcccaaccttttgtcacacgtatcaaggactaaaactagaaaaaatgaatgaaaataatgagtgaacaatggtattaaatggaaatcaagcaggtaagagttaaaaaaggaaaaaaaaatatatttgagagacatagagtagccagctaacatgaaattgattttttgaaatataaattgaatcatgaataaaataagattatatattatataagatgaaaaatcaaattatattgatataactttgacaattattacataattttataacttaatatataacaatttttattgatccaatctttgaattatatctacatgttattattatgtttttgtcaaaattaaataataataaaaacataatcaaataatttatattttagtacattttaaaatatttatattatattgattttatatatatgtgggatagctggattccattaaattaaaaaatagtgtctgtcatagtcttagatgtacaaatggagaaaatggagaaaagtcaagtggaaaataatcaatcaaattctacttccaaatccaaattccctacgtactcaaaatataacaaccactaaacaagaaaaccaaattccctactcttctttcactaggaagaaagaaagtaagaaaaaaacggttttgcttgaattgcttgtggaagatttccagaagtaaaattacatgaaaaccccccacaatttttttcctagtccagtggtgctactgtaccttttagtttagaacctcattgttaaccaaagggttagaacaaaaaagagcaatagcaactcagtattgttggtgccttttaaactagctcctttggcattgttgataccagttgtagatgttggagttattgcaaatgtgggtggtgtacttgttcctggagttgtaccacctgttgatggtgttgtgctgcctggtggtgaaccagtagatggtgttgttcctggtggtgaaccagtagatggagttgttcctgcattgctgcaagaaagccaaaataaaaaatatcaacatatatagtgtgtgtttggaaataagttaaaaactctatttagcaatttcctactttcctaggcagcaaacataacaggataaaattgttactgcttcgttgaacggaaaacaactttaatacaaacacaacaataataggtctttaagtaatgaaaggaggatgaataactaatttcattaattaaattaaacattatacattaagtacagacctaggaaatgtttgtgaaacatccaaattattccagctcatatttcaatagactaagcctctgacattgctagtaagatgacttttctgtaagaatgtacatgaaaaaaaaaaggaattttatctttaggtactgtaatatttggagttagaagtcttcgtatctcgtggtcgatcgagtgatctacttgaatcaagagaatttggtagattattataagagaagagaaaaattttatcttctaacagaaagataaagataaatccctaacatgaaaaactgtctattatttgagaaaaaacaggataagaccatatcttttcctatttacattatcttcaaaaggagattgagatttcacaatccaatctcacctctatcaaaggagatcatcacagtagaacatgctcatttcaattcatatattgatacttgcatacctttatgtatttaacttgacactaacttgagtgtcagagtgtctttgcatgtacactccatcattttttagggagaaattcacataggaatgccgctgtgagaaggtcttgccaaattcggtaaaaacatgaatgaaacaaacttgtttcggagccacattgccaacttcaaaattaaaacaaatgaattccagttttttgaaatgctttttagattatgctaagtgaagattagaaaaggaataaaatagggtataatgctgaaaatgaccaatgcttccaaccacttcaaagaaaaaaagtggaaactggaaaaagattcaaaaagaatagaaaaactgggtaaaaaaaaatgaatcacatttaaatcggagtacaagaaaaaaggatttattaaaaattccttgaatttccagaggaattcacctcaagattccaacctcacacagtcacactcaataggctgaaaattccttgaatttccagagaacttatccaattcaatagatgcataacaaataaaacaattaaaaatcaaacaagaccctagtaatcaagaaacatacctaggacttgaagggtagacacatccagatgatgtagctgtacaaaaaaaatacacaagaaagagaagaacattagtaaaagtgaaattctagaatatgtaccaaaaatagataggtttggaattatacttactaggtggatttgcattggttgtggcagcacctgcaaaatcacaggttccaggagcattaccctttctttggtaatagctattaactgcatagttacagtgatccttcacagtgttgggttggtaacaagctccattttggagaataggggtacagtcagctccagttccacaagcataatctattgctctctgaagggtttgatcactcacaccatctttgcatatacagtaaagagcacctattgcaaatcaaataaaccagaaaacaaaaaagacagtaagttcaccccataatcctatcttatcaatataacatccgaagcattttttttcaatacaaaagatatcaaaattacattaaaaataaaatatatcattcagaatttcctttaaaatcactctctaaaatctttcatatttcggaaccttagaaagagaagaccctttacagaaaagacctagaactaaagcaaggaaaaagtctacaaacagcaactaatcatatgaacccacctcagaaaaataagggtgatttatcattattataatttaaaaaaggaagctttttgaatcaaatgttgaaacttcagaaaaaaaacacacacagagacaaaatcagtgcatggtacttacttgaatgatcagtgaaggctaggaaaagcacaagatacaccaaaagagccataacaagagaaaattgtttattttgaggtaaattgaatgatcctgatggaggcaaagagaaagagaaagaaagacagatgaaaagaataatgcgttttttctaggaaaagaaaggactctgtctcagacactatttatattaactcgcttgtgttttactaaaaaattagtaccccattgtgttttattacattattaaattaaattaaattatatatggtacaaagtacaaacatagggtggctgttatggggaattgtgtacataccacgtaagctttttggagttgtaagttgttgaatggccggctactttgtcatatattttttgaacggtactatacacgtgtggttgaaaggatatttgtgaattccggttattaatttgatcaatttaagatgtaattggcgggtcaatatatattaaaaatttaaaattatatatatttattatataagtataattaatattatttaagtaaaaaaatttattcatatttcaaaatttaaatttaaatttttttaaaaaaattaactagatcggatcggtccaaacaagattcaataatcaatttgaccaaatttaattagtacaatctagatcaattacgtatctgatgtaaaagtggaattggtctagaccattaaatttatgtctaatcaatgtgatccatgaatccaacataaacttgatacattattggaaagttaagtcaatattgtttaggttgacaatgtggaagggttaatggaccattgcaacgtgggacgtatcatgggttgagacttgagagtcaattaacattcacgttaatcacgtttaaaaataatagtcaaatttaatttttgttgcctttattttctaaaattttatattttcagtccctctatttttttaaatgaaatattttaattattatttttaaaagatttgtaattttattctttatttttaattgaaatattttgtactccactttttagttattttaatcattgtgactaattttaaatattgatttatgtattctataaatgttgactgagaattgtttatttattatgcacataataatattttttaaatatttattttctaacaaaatttatttattaaaaatagaattgaaaagtacacaagtcaataagtttgaaattgatcaaaaataataaaatcacagattttttaagagtcgggaacaaaatgtcttaattgataaatagggaaacttaaaatcacaaattttttaaaaataaatgacaaaaatctcaattaaaaaataagaaaaatgaaatcacaaatttattttaaaaaatatgaggacaaaacttacattttagtctaattctttcaattataaagtcgtaaaacaaactctggagcttgaattccaaggtccacttcttctaggcatgtggataagccgaatcttaaactagatctgatagaatcatattaaatatatattgataaaaaaaatctatccttatttgcctatcacacattatctaaggtaatttactnnnnnnnnnnnnnnnnnnnnnnnnnnnnnnnnnnnnnnnnnnnnnnnnnnnnnnnnnnnnnnnnnnnnnnnnnnnnaataataataataataataataataataataataataataataataatatataaattttttccaaaaagaaaattgaaatgcacgggttaaatatttattttatggatacacatctataatgaaaaacaagaatatatgttttctataatctgatttttaattatttgattaggataataatttggatcaaatataattgttttgttttgtgttatttgaagtggtacactacaactgtttcctattatactattattaacataatattaagatactttttaatgaattcgttttaattttgtattattgttttcactttttaaaaatttaattaaatataagtttgactaaattagtgaaaattgattagctttttttggtatttattataatttttattttaatttattaataattttttatttgtatgaaatttattatttatataacgagtataagttaatatgattataatttaattttaatcataaagtattgacaaatgaattttcaaaaaatatatatatatttcatcatatttaatacagattgagatgtagaaacatgagcttgtgatatagctacacctaattccagaccggttaatgcaagaactataaataaaggaccaagatctcattcaaactcatttaattgaaacgtgattgaatctaaaaatgtatacattttaaattgattgtgttgtaataaaataaaattgattgcgcttgaaaattatgaatttaatttattacatgataattatatcacgtaattaatataattgttataattgatattttattttactacaacttagtgttttcatttagtgtagtattcactatgattattatatgataaatatttgacatggtcacttggtggaattaggaaaagttgtatgttgcagtccaatataggaaaagctgtaggcagtggccaagcttgaaaatttttgttgaaggggccaaaataattaagatacattatataatttaatgtagtaatttttaaaatagtttttttatggttgattttcagcatttaaaaataatattaaaatattaattatttttaattaattattttatgatatcaaaatatctctttctttactttattaatatcatttttagactctttttttaaatgaaaactatacttttgtatgatactactgaatttttttttaaaatagagaatttatttgtaaattatttttgtgaaaaattcttcaagatatattaaatttttatgtaaaacaaaatttctatgaaaatatataaatattaaaatttactatgatttttttaacaaatttaagaaaatattcatatttttgtcaattaattaataaaatagttttttttaacaatgattcaatagttaacatatgaaaaatattattgacgtttaatattagtcatatgtacttattttatcaaaagtaaaaatttaaaatctaataatatttacataaaaaaattatttatgaaaataatagtaacaaaaaatgactaaaaaatactttcaatttaggacttagacatgttgnnnnnnnnnnnnnnnnnnnnnnnnnnnnnnnnnnnnnnnnnnnnnnnnnnnnnnnnnnnnnnnnnnnnnnnnnnnnnnnnnnnnnnnnnnnnnnnnnnnnnnnnnnnnnnnnnnnnnnnnnnnnnnnnnnnnnnnnnnnnnnnnnnnnnnnnnnnnnnnnnnnnnnnnnnnnnnnnnnnnnnnnnnnnnnnnnnnnnnnnnnnnnataatacattaaataaattgaatatcttataatataaaattttccgagcaaggctttttgttgaagtgtataacaccttttaatatttttattttctgtgacatttatatattgcgtataaattaatatgattagaatttgaacccaaaaaatcattacgactaaaatataatttaattttaaccataaaatactcacaaatgaattttaaaaaattatatattttgtcatatttatgttcattgaatgataatgatattcttttaaatcatttaaatgaaattagattggatctaaaaatgtttgcattttaaattgattgcattgtaacaaaaaaaaatggaccgcactaaaaataatataaatttaattgattgcatgctaattgtattcgttaacacaaaattaaaataattgctagatatttttatttattgtagttttcactatgattatgtgttaactaaatttattaaaaaaatgtgttaactaaaataatttttaaaaaatgaaagatatgtgatagaatacttaattaaaaaccttaatatattaatttgcattttgattgatagtatgtagaaaattaaaatattttatttaaataaaaaattaaaaaaatctaaaaacaagagaaatgtggtatgcaacaagttacacgggtctaaatgaagctttaatatggtgatttaatttttatatatgaagactattaagtttaacataattaaagcctaatttgcagtggaatgaccatttgttaattctgatatgtaatttattaattaattctaagtatataaaaaaatgtttaatatcatatattagtaaaaaaaaagagtataagtattttaaaatatatacaaaacatgaaaaaaattaattaattgatgagcaagattattttatacatctcaccatcatcaatcatttctcttcttattacaccatattatttattatacttacattttctcttctctcttcttttcataagtgtcaaataggttgtataggtgtccaagtatcatttttcaattataaattagagctgagaggtataatatcatcccctgctgaacgttttttgcagccaacgagtgcatagtaaacacacattttggacaaaatcaattcaaaagtaatcaataaagtgaagagatgcttttaagtaaaatatgtaaattatccgttatttcaattgacccctttacttaaaatacacgaagtataaaaaaaaaaaaaaaattggtaactaaaataagccgtaggttgaacttttctagatgtaacacgagggcacaacaactatgaagtgaccataatttgcattttgtggtccaaatggacttcactgctcctgggacaatcgtatctatcagtgctgtaaacaaatatatatataaaaaagatgttaccgaaatattatatgtaagattagtgcatcaaaattgttgggatagtagtaaatcatgatggctattggcccaaaaatgaaaattaattggtattaattgagacattgactaattgaccatccaacacaaaacctctcttaactgagttaatcgttgagctagaaaatcatgattgctttttgaccaaactaaaattaataggcattgattaaaacattgactagctgaattaacatcctacataagcctttctagactagatgacacccttttgcattctaaaaaagacaaattataaggttgacttttacatcatttcatttacctttggattccaacgacttgatacaacatacactaaggagaaataatgcaaaattcaggtgaaaacaatttcatacacaaacctcagaagtttcagcaggtttggcttcttctgttttaatttcgtcacctgcacgagtattcatgtatcattattcttataaagcctcactattgagtagttctttgtgcagtttattttacaaactagataaaaagaagcaagattttgcaaataataacaagtagctctagaaaaaaaatgaaattcaaaggcaagcaactaattcctttgtctttactctaatgtaattctttcgaaggttctaagagaggctgagtaggttggaggaaagtgttgtagtgacagtgtatcaaaaaactctttttctatccgtcttagacataatcattttagcaaaaaaacatgttatggtaagaagcatgataataatgtacttttttcaacgtattttattatttacttttaaataaaacttatgaaaaacatattgaatataaaagtaggattcattaaacaataagtggtggaagaatccatatcatttaatgagacctacatatatatctaataaaaaagagtatgtcagagaaaaaagttgctatgtttatggtaacattatgaggcagaatccaaatacatcttatgtcaagtctaaatcatgatcatacctccatcctcaggtaaatcagaggtccagagagtgagattgtctctcagcagctgcatgatcaaagtgctgtccttgtatgactcttcactcaaggtgtctaactctgcaattgcctcatcgaaagcttgcttagccaaatgacaggccctgtaattttagtaataagtaaatgtcattaacaccagctggcaacatacctaagcaattgaaccaatgcagatgatcatattgaaaggagtgttgggaagcacatgggagttgtaaaagtgaaatgagaaaaacttaggctttagaagaaaaaaaatgataatttataaattaaacatggatgaaccaagatgtaagaataagtgtatgtttggattaaagttgggagaacctgagattactttactttggaaataacaactttttcctttcttcatttagtacactagaatttgttattatgcattcaaatttgcaaaactactatccaaactttaatccaaacattgccgaattatgttatataaacttgatgacatggacaccctcttcccccccccccaaaaaaataacttaataattatatggtgggtgtttcttcctttacaccacaaatttctctcgacatcttcttaacattttggaaagggtaatccaaaatgtaatttaaattaacctttctgaaatgtaaaggagaccttatgagaaacttgtgggtacagatttggggtccaatgggtttaattcacaccaaacccaatactttcggccctaaattgcaacagagaataaaataacttgtaaatttgttgttttctggtccttcgcaagtatgcttgtatggaccaagagaaaaaaaaaaaaaaaattacctttcaggagagttcagtatctcataatagaagactgagaagttgagtgcaagtccaagacggattggatgtgttgatggaagatctgtgttagctatagctaaagcagcctaaaaacaccaatagtttgaacatcaaacaaaaacgccaaatatagataaacacaagaaattatatatgtatgaatcaattattataattccctggcactgtcttcaattcttactgatccaaaaaaaaaatctgttcattgctgaaagagaatctaattagacaccaacctcatatcccttaagtgattgctcagcagcctcctttctatcctgatcggtcttgaactcggctaaatatcgataatagtcacctttcctggatcaaaatgaattgattaattaagctcgaggaaatcaaatacagaaccaaagcatgctaaaactagcaagagatatatcatgacactaacaatcttttttttcttgttacagcatattattcaccatttttgtatcaaataaggtaacggaatataaaaacataatgccactaacattttcatggcattggactccttgaatttggctgtttgcggacaaacagtacacaatgcccaaaaggataaaccccatccctcattcagttaacttcattcatgggttacctcagaaaattaatgtcttgatacaaattctcccttgaagaaaagggtgagaatttttaactattgattgaaaagttaatgaatttttttttgtcatattttattattgatgtgtagtattcatcgattttgtcaatgactaatttctgttatctttagtaggatttccttatttacgtttttttcatcaataacactcaaatctgaaaccttacttaaagagaactaaatttagtttcacttgaatcaacatatatatacattttaagtttagttatgcaacttcttaaatctcaattcttagatttcaatcaatagttataacttctcactaaagtaaatccctcattttagagaagtgatatatctatatctatcaagttatatttcaaaaaggaataacatctactcaaagaaagtaaataatattgaacatgactcacatcttatagtagaaaacggtggcttctcctgaggtggaagaaggaacaagatgctggtcaataatgctgagaatgtcactgcaaatctttgacagttcttcttcaaccttttgacgataattcttgatcagttttgcattgctctcatttcctttagactcttccttttgttcaattgatgacataatgcgccaagaggctcttcttgcaccaatcacattcttatatcccactgagagcaggttcctctcttcaacagttaattctagatcaagttttgcaattgtcttcatgcattcaaccatctctgatacggagatcacacaaatatcaagaccaacgtattaataaaaaattgttcattcattaattttgtttgcagtttttgtatgtgagcattttccagcatgggattgcacccccacataacaattcataatcattcttatcaaacattatggtatgcatcaacaacttaataattaataatcaatctttcataagaatcgatctcatatgcatcattaatcttaacaacttcaattaaaggaactaatttcaacatagtaaattaataatcaatctctcatttcatttttggttttcaaaaaatataatcaatctcataagattctcatcattaatcaaacaataaattaaataaactaatttcaacaaaataaaataataatcaatctctcaaaaatttctcatgattaatcaaacaaaattaattaaagctatatttgataatccgttggttagcaggagaatatccattcatgaaaggaactcaagtgtatctttcgagatgcatgtcattttggaggcttgtgaacgtgtttaacttaattcatatttatagatcttcattaatttaacttaagcaatatatatatatatatacacacacacagcatgacatgttagttaatgaaaatgttgcaacacaaacaatcaacattaacataattgaatgtttatacaaacatgaaaaataaaatgttggtacaaatgtaaaagacaaaaaaaaaactaatattgagtcacggactaagtcgctctctttaagacgtttggtggatctgccttatgattagagggaaacaacacagaaaaaaaaaaaagtgatgatcatcaccttcgtatctctcggcttgctcagagagcttggccaagtaaacttgggtctctctatccttctctgtagacattgttgttgtattattgttgtaacagagagaattaaattaaattaaagaagaagaaaagaagcttttgagaataatgtgattgtggagaagaagaatgcgaggaagaagaagggaaggaagggtggaatgtttatatagatggaacaagtcgtgggggaagagggcgagactgaatctgagcccttggatttatgagagattttgaaagatgaaaaaaacgcgcaattccgaaggactgtgatcgtgcttcgttgtaattctagttgtgctctttcttaaagccactcactcaatcctaagttgtcggaattgcttaacatgttttgaaaattgtgtaattatattaattaatttcaaatttgacatctattccattatactattatccttttaaactttatatttttaacggtgaaaattccatgtatgtatgatgtatagcattcgttcgtataatctagtactgttcctttgatatataaggtagattgaaaaaaaagaatataatatatatcaaagactcatttatatctataattattaataatgaaaattactctcgattaatatacatatttcaaattccaaatttacccttcaatatataagtacatttaatactctctatatattaattatccctcttttttctgttgaaatagtcttcaactacggcgtaatcataaactctccatattcatgtttcaaactattttcatgaatgtgtttttaaaccacttttattgtttttatttatttttagtttctcctctctctttcatactaatggaaacacatttttagtgtgctatattatttttatatttataatactttttatatatatattgaagtgtatattaattttatttcaacatattttcttaatacatgttgatttatatgaattgtcttacttctatattttagtagtacaaaagaatacctaagtttaatattagtaaaatagagttatcttagttttatttgatttttattttaaaaggtttatattagaaattaatgaaaatgtttataattaatatacaatttatatgtatgaaggaaagggaataacgaaagaagatggtaacaaaagaaaaatacaaacacaaaataatctagatcttgaatttatacaattaaaaatgaatttgaatttgtaatgagtcatgcactaaaataagatatattaaaatacattgtaactagttatcctttgcatttttttatatacactaggtgtgtctctccacatttttatttcgtatttttcactaaaattgaaatatttttatcttattattatattacagtaaaaaaaattgtgactattatatacatagatataaaaaaagttataaatattaaataatttactcttcttgnnnnnnnnnngcatttttttatatacactaggtgtgtctctccacatttttatttcatatttttcactaaaattgaaatagttttatcttattattatattacagtaaaaaaaatgtgactattatatacatagatataaaaaaagttataaatattaaataatttactcttcttgatccttaatttatttattatgttcaatagttctttatttttaataggtttaattaggtctcatcttttttaagataaatgaaatttggtttatttgtatatacaatgtaatcaatgcgatgatttctcactccttttgagctctacattatctataataaattgacctacgaaaaattgaaatgaacaagaaaggtgaaaggggcgagaaaaatgaattttggaataaattgaaagaatcttttggtgctatggatttaggaggtatgcgtttcaaggtctgctattgttgtttgataaagatccatagttgcttctcattgaaaccatgcttcttttttccttcttttttcttattgttattgttttgtgttggccgcgagaccattgacacacagcaagaaagaaaaagaatgaatgagaaagagagaagacataacgggggaggctatacgtttgggagtcggacaaaacattaacgttaagggatgtgcatttagcacacaactaatgcacatcgcaccacatgtcaggccaatagaaatgcacatgcaacatatcccaagtcttttgtatcccaaaatgacccaccaaaaggaattcaagtaaagaacatttaggcatacacaaatatttttctttgaaaagaaatccatcatgcataaaatacccatcatgcgcccccttttcacatgcaacatatattttggaaaaattatcatcatgcacatacaactccttaatgtgttcaaaaccaagcaactttgtttcaagcatggcacgcaaagtatatcttctagaaagaccatcagccacaatattcacttttccttgcttgtgtttaatgacataaggaaattgtttaagaaattcaactcacacctaattcgtgctgaacttcatgtcccattttcatcatcatagatgcaaaattaggacttgagactagaaatacgacttgtaggaaatctttagagctttcaaactcattaaagaacgcctaaaacagacatctagaactcaagttatgttcaaaatattggaaatgtttaggctcttcactcattggtctttggactcttcactaatttgaatcaattggagtaatttgaactcttctttcgggttggtctttagactcaaggtaaggttgatatgttggcccaatgcttgagaaaggaagtagtttatttcatgatctaatgctttttgtgcttcctttgattttgcccttatcatggggtctcccaattcttggtcctcatcactacatatattatttatccctctcttttctgttgaaatagtcttcaactacgaacttaatcgtacactctccatattcatgttacaaatctcatgaacgtgtttttaaaccacctttattgtctttatttttttttttagtttctcctctctctttcagactaatgtaaaaacatttttattgtgctatattatttttatatttataatattttttaatatatattgaagtgtatattaagtttagttcaacataatgtctaaatacatgctgattatatgaattgtcttacttctatattttaatagtataaaagaatacctaattttaataattagtgaaatagagagttgtcttagttttatttggtttctattttaaaaggtttatattagaaattaatgaaaatatttataattaatatacaatttggatgaatgaaggaaagggaacatatgaaaaaagaatatggtaacaaaagaaaaatacaaaacaaactaatctagatcttgaatttttacaattaaaaatgaatttgaatttgtaatgagtcatgtactaaaataagacatattaaaatacattgtaacgagtcatcctttgcatttttctatatgcattaggggtgttcacatttttatttcacattttttgctgaaattgaaatgtttttatcttattattagattacaatataaaaaaatgtgattattatatacatagatataaaaaagttataaatattaagtaatttactctcttgatccttaatttatttattatgttcaatagttttttatttttaataggtttaattaggtctcatagttttgaagataaatgaaatttgatttatttgtatatacaatgtaatcaatgcgatgatttgtcactccttttgagctctacattatctataatagatcgacctgcggaaaattgaaataaacaacaaaggtgaaaggagtgagaaaaatgaattgtggaataaactgaaagaatcttttggtgctctagatttgggaggtatgcatttcaaggtctgctattgttgtttgataaagatccacatttgcttctcattgaaaccatgcttctttttttcttctttcttcctgtgttattgttttgtgttggcctcaacaccattgacacacacagaaagaaacaaaaagaatgagaaagaaaaaagacataacgggggaggctgtaggtttgggagtgggacaaaacattaacgttaagggatgtgcatttacaaaataaaatgaaaactattttagatatgggagaggaaaaaatgtaatgagcactatcagtcgaatagaagagcaaaggattgaaaaaaaaatataaaaacaaaagagaattaattaaaatgtatgtaatatttaatattatcaagaataaaatgttcttaaaaaagagaagagaaaaaatatttaatacaaataatatctcttctatctatttttatagattctccattagtgggtctttttttttctttctcagtcccaatctcttcctgttgaatgtgatgggggaatatttgtgctgagggtatttcctagatcgatcgatagatgatggtttctttggtttcgacaaaggctgccttttgcaataagggatgagatgaattataggatggtcccgagaaggtctaaataccccttagcatcaattaaagtgtgtgtgtgtatatatatatatatatatatannnnnnnnnnnnnnnnnnnnnnaagagaaaatcattccataaaaaataatcaaatttatattattttcctttaacttttctttaaatttaattcatttctcatttattgattttctcgtaataaaatatgtttatataccataattaatgaatattatctatttatgtgtcaacatctcattatttataataaaaacaataatacaaatatcaattatatcttatctagtctttttagccatttaattttgaaagaaaatttgggttttcagatatccatcctatcaactatattcacactttttattttatttaaatctttctcttttcctgaatgaaatttactataggcttgaagcaagtaaagaatgtggaaattgggagagttaaaactacaacatttttattgcttttgcaatttcttttttaaccattttacacgacaataattttccatctccataatgagacttgtttttttttttttttttttttnnnnnnnnnnnnnnnnnnnnnnnnnnnnnnnnnnnnnnnnnnnnnnnnnnnnnnnnnnnnnnnnnnnnnnnnnnnnnttttttctcattcttttatgtagtttgagcaacttaaacgtcatttgatggaatttgatttccttattgtatacaaattgcttcacatgtctgtcaagttttatgtaattttgccaactgtagatatgtgacagacattacccgcgattttgctgcaactacggtggaacactcatcctaagtatgaactaaaaaatttgttggcgtgaataaatattttatccaattgtttctttctttttctttttggattgatccttacgaacagtttatatagtacgtccaattatgtaggtgggctctctcaaaatatgcaatacttcaattaagaactatgtgttaatttttatattttacgtgagtctgaaaagctcaattaaagaccccctaattactataaaaaaaaaatgtattttaagttttcttccttctctatttttcacgataccatcttttattaccttgatgtcaaagagtaggcagcgaagagtaatccaaactaattatttctcttctcttttttatggcaaagagtaggcagtgaagaatacatacctattgttataaattatttctcttctttttttcttctaaacttttgatgtaaatggaaaaaaattgaaccttgaaattattgtcgtgtgtttttatgcttttataaaactcacgatattctgaacaaggagataaacctcaaannnnnnnnnnttcacgataccatcttttattaccttgatgtcaaagagtaggcagcgaagagtaatccaaacttattatttctcttctcttttttatggcaaagagtaggctgtgaagaatacatacctactgttataaattatttctcttctttcgttcttctaaattatcttttgatgtaaatggaaaaaaaattgaaccttgaaattattgtcgagtgtttttaagcttttataaaactcacgatattctgaacaaggagacaaacctcaaaataacattttaataattatttatttaagaacaatttcatttttcattaaaatattgtatccaatgttatcacgtcaattttttttcactatctttatttatctcttacaaattaaactatgtttgtatagtaatatataagagcaagaaaaaaccttgtcaagttaaaaaaattatttacataatatttctgttattttaaaaacaatataatttattttaataataaaaactcttttatgataaataaaataattaaaaatttaaattaataaacaataccaacaaaactttaccccactagaaataaagttttaaagtaacatgcctaaagaaaatattttactaaaaggctnnnnnnnnnnnnnnnnnnnnnnnnnnnnnnnnnnnnnnnnnnnnnnnnnnnnnnnnnnnnnnnnnactaaaaggctatttctggaaaaaaaaaaaaacttggtagtataagaatatgagtctggaaaagcatatataaacatttcctaaccagtaactaacctaacaaattttaaccattttcaagaataataatacctaaaattcatgtcttaagaatcacaattcccaagtattaaaaaagaaactcttaccaagcatcccttgcgatttagatatatttatttgggtggagttgtaaatgcataaattttgcaagagcattactcttgcaaaagcttttcctttgaaatattcctcaaatgattggagaaaagacgaggggaaggttaggtaactatgtccacttcattcttgaatttcatgaccgttcacattctttctcaaaaattagtgattgttcaagagaaagtgatagaagtccaatgatcgatagagacatattgaagtaaaaaatatatataaaaaaataaataaagaatgctaacatgatattagaaaaatgaattaccagaaacttcgacaaaagaataaactgaagccaaattcaacatgaaccttcacaatctacagcttcctcaatcctctgacccggttgtggacaagattgaaaacgtcaaggctctgagttttgtatatacaaagatgtgccaactaaacaatccattctctgaaacatttacaaattatttcagttgcatgttacagatgaattctatacaaaaacttcttctaactgattaatgtcatgcctcctatcataaacaccattatctattcaatacatttaaaatgtttaattttatactaaattaaatgctacccgtttttaccaaagtaagatgttaccctgttaagaaaaaaggcttagaggaattaccggagcaaaaaaattgtgttcatttgtcatggtgagatatacttgtgctccatcaattattttttcacaaatggtttctggcaaacaagtagtcgctggtcactgccattctgaagatcaattatccttgcatcccaacgtacttgtgttgcaagcatgcgagccatctctatagctcccattgtatcagaaagaatgacccatccctacaaaaatggtgcaacataataaaaagttaggcttcattgaccatgtctatatactaagactgacaactaattgtattcagatgcacaaatccaataaattatactaccttggttttatacataagatccacttcacaataataagggaaacaaaccggttcatttaattagtggggttaaatttgccaataattaatttaattctttcagaattctcctcaaaattatttggataccatttttaaatctcttcccacctaattaatcaatatattttcacttagggggtgtttggtaggagagaaatttttttatgcttgggaatcatgcttcctaggaatgaagaaaatttgtttggttagtcgttgggaatttttagataagttttctaagaattaaaaagtagcgtgatatttttaccagtaactttaattatttaccacattaaataatttaataagagtaacatgatgcttttacagtttgttatagtaaaacaaaaattaagcttgggaaagtcggactcctacccacctccacgggattatttttgtgggaatgtgagttaaaaacaattcccaggaatcatagtttcccgagaatatgtttcttcaaaatacgtatcaaacatggaaaactaagtttcccaagttcgaattcctagaaaagtgaaaatttctcccctaccaaacgctcccttaagtaatgacattttttggaatttttgctttctataggaactggcaaagtgaatgatagagatagttctggctagtgatcttccccaattctcatgagagtataggaaattaatttactgcatttatcattcactgaccaaaaacagtatcgagtaactacgggccttttcggaaaaaaaatagttaaaagacaatttagagtcttataaaaaaataactatggcaaactttccaaaagattcctataacaaggataacagttagtatttcataagagcatcacaacaatattgagcatgcatcattagattaaaataacttaaaaagaacttatataatatctaccaaaatcctttcaggatatgtcaaaagaaaaaaagaggtagaaaggaagaggaaataactgttctgctatcttttttttaatgttcactgtacaaaaatcaaggatgaaaccctccagcacaaagaatcatgaaaatgcatataaacagggacatcatacctctggacgcagtattctatccatctccaagaataagtctaccatgctacacctctctgaggagagatgtgagataagtccgtatgcatgaagcatatcatatgttctggggtacgtggggaaaggttcacacctgaagatcaatatcagttgtcagatacaaaaatgaattatccagaagctcaaatgcattaacactattttacaaagaggtttgtcaatgaattccaaagaagagaaacttcagagtgaactccaaacaggtaaacgatgttctttagaattgggtttcactataaaactacgtctactttcaaatccaaatccaacagatcaagtgcatgcatgcaacctacattcatcttcaaattcattctcaaaagaaaagaaaaataaagaatgcaaggttgtgttagacataaaggataaaaggtgaatattaggtattgaaatctaagcattgaatgtatctcatcattggtatattatgcctgtttgtttaagcttttaacaaaagtaattttaagaatgcataaaaataaaaataatgtcatttacattttagagattttatgaaaagtagaagttatcttttctttggttacaattataaaaaatacttttcattgtaaaagatagttacagttatggatttttttcccaaaagctactcacaacagcttctcaaaataataagaaattttattttaaacaaataattttttaaaaaagattttcttttcaaaattaaaggtatttttcatgaaaaaaaataactaaaataaatggactctaaactaataattctacattagctgaactaatgccatttaataatttacaaaataatgaattgctgaggtattattttgtacatattttacaaacatcactaaatccttttcaatgctgaaattttcatgctcagcagttaaaatatcatgtacatatatctagtaaattatctaaaattactgttactttcccaactagcatacaccactcttctgtcattttacataagaatgagctaataaggtaagtgaaataaatctatcaggctttaatggtattatcagttttcaccctcaagctcaacagtattaccttcataccttgaaacaatttttcagtatatggaaacattgtttagatcacggcatcacacacaacttgcctagaccatgaacaaaaaagcaacttaccagtcatgcgtgacgccagcaaaacctctatctagtataagaggaagtgcattagaagcccttgcaggaacaacattcatgacccacactgattttttctcctccagcagcgcagcattcaaattcccaaaattagcactcatgtccataacattccggatcatgttatatggaggcaatggatcttcatctccaggtctctttggatggtcagagaaaattagtggtgtaagtaatgaccaataattgttaacagctgatctccaatattggaagtcttcataaaattcttcaggctgaactcctgcaataataaaaataaattcatgaacaggcaaagcagtacaaaaaggaaatgaaatttagaggggaagaagcaaggagaaagacataagcagaaagctattaaaaaacaatactttccatgaattttaagttcagctgagctcaattcagattcagaagatctgttctgtattgcaatccagcgcttgctagaggtcccacttatacatggcaaaagaggccggtagtatgactgagtatcatctcctttacatacttctatagtatgctgcttactgcaattaaaaacaaatattattgaaaacctagttataatagtaagtcttcaatgaagcaaaccaataccagaactagtgatatttgatattagtcatctcacataaacagtctattgacaataattatttatcatttacatcacccactttgacacaaatatccttaccgagatgcataacaaccaatatcagcagtcttctgccagatgaaagtttcatcttgctgagctagaagagtccagcagagttgctgggtcagcccttccattgggtttgccaagattgtttttttctcccttgatgaaccctgtggcctgcttgtaggtgaggttaaaacaaaatatcctccaggtttaagaacacgatcaacttctacaaggaatattccatctgcaggatgaagtcaatgttagaaggcaaaggacagcagttcacacagaagctaaatgatattcacaatggtatagaaaagtcatggaacaacggaaaaagtataaggaaatgcccattaaaatgtataattacttttttcatcccacataatgccgcactgagcacagtgaaccatgtcataagataatgatggatatggaagctgtcttgagataaagttgccaatcatagcaggaagacctctctctagagacaattgaacttggctgccagttgcttcatatgccgcaatacaaaccgccattattttcagcgacaataaatgagctccaaagctaccaaatccacaattaatatctagtatatttcgaatctgttataaagtgattaatatagatgagtcatgtatattttggaacaaaaaagaatggtccttaatgagaattataaagagaacataggcacctaaataacataatctttcattactgctactataaacagaactattttgcagaaaccttgtccatgaaaaaaattatagttccacaagaacaattagccagtaggccatggtgtacggaagacttacaccagcttgaggaagctcagtgtcacttcctaaccctatcatctctgcaagttggcgagtataatctttcacactgttgaagatcataccatcctccgcgtgaaaggcaatctgattctcttctagtagcatcaacctagagaaatcatcacaaaattttaaaaatcgatttgcaaagtaaaaaaagactaaacaatcaatcataaataacaacagagaaaaaccagacaaaagctacattacattcattcaagcagtctcttactcctttatccccgcaacccccaataaaatattacggcaaacgtaaccagtgccttataaaaacgggaagttttcattaaacaatgtcattgatgcacatctactgtgactcccaatgcattttggacgtgaattccaataaaaactctattttgaattcctcatgacactggttagcaagacccaaaaactttctattcacataatcggtagttataactaataagggtttaaaaacaatttgcagtagttctgcatccacatcaggcaaactcataatttctgtgatatcaataatttcaatgcaactacaaacccaattaaccaattcaaaaccatggttttatttttatccaaattgatgtcaaagacaatttcccagcctagcaagtagcaactatggcagcacagcaccttttggtcatacttccagatgaaagaaactgatctttggtgatcttcacatttccactccatataacgtctctcccagccggccactgtaagggagccttgtattccttcggaggccgaaccaaacacttctctgtttccttatacacctcacaatgtcgatcaaactcctcaccgtctttaaaccccgcaaccaaattcgcagacacgttgtggcaaggcacgaaattctccctctccttgccgcaaagtcccatctccttctgccgcgcgccgccggcgctcgacacggtcctcagttccaagtaatccaccgcggcctgctcctttatcctcctgtagctcgtgtagattagcgattccgcggtggtgcgacgcgatgaattcttcttcgacgacgacaaaggcgaagaagaagaactcaaaactgcaatcagagcgaggaggcttatcaggaacaggatcaaccagttcattggcggcttatggccgatgacgaaggactgtttcttcaaccacgagcttctcatgtccgaaaccgtgagtcgaacgcagattcaaaacaacgctaaattgtgaactcggtaggcgttaaccctagctttccgaccataacactgtcgtcactctcgctgcgagcattgaaaaacgacgtgtcgcacaattgaaacggaaacgcagattcaaacgtggaatcgcggaagcttcgtaagacgatcaagcaatgttgatcgggggaaacagcgagcgagcgagagagacagagagagagatcaatcggatcgccggcgacgcgacgcggatccgatcacgcgtggaagaggaattagggtttcgctgaagaagaagaagagagtgagattgattcagagagcggttggttgattccgaaacggtgagaagaagaaaaagaacgttgtttcggttgggtccagattatttggattgcgacctttccttgtgttcaaaaccaagcattttttttttccttttctctttcttactttatatgcctctcaatcatgcattattaatcagattcaaaacaacaacataactgcatcatttactaccacgtctcttccattaagtaaaactaaacaagaaatataaatcattgctattaattaatggcgttttatacttttaacttttggaattaatttaaatcacctgtatatatttcatccgttctaaaataagtatcacaatttaaaaaaattatccaaaataaatgtcagttagttttaaatataatattaataataaaagtaattttctaaatcattttatttatttactattatttttatttgtattaaaataatttaatacgatactcgtttttgaaacggatggagtataaaattggtgtcttcttactacccatggaatttttttaatgaactcgtattgtttataataaaaaaaatgtttagtattaatttcttaacaaagactaagatactgattggcgtttgcactaaatttaaataaatagagccataaaagcatcaataaataaggtttgagtcttcgtggagcttaagcaataatgacaacttgacaatgaaaggaatacaacattaatccaacagctaccaaatggaggcaactctgttcgttgccagccatgcaagagttaaagacaaggatatggatccaagttctttttttaaatgtaaacttcatttctttttgcaaattgattttttgagtacacaatctcaattcataattgaaataatttatacgactgaatataattcttttacaaatatatattaaaaatcttagttttttatccattttatttataaagttaaatctgagaatggtcacatattcgaatttttcgttgatatttctaataaaattaataaaaaatacatttgtctattaaaaaataataagttaaaggattaatgggttcataattataattttgaagtattaataaaaaaattgtaatattgaattttttaggaagtatttcaatgttatcgtaggaccaattttaatacttgtcttaatgtttttatgtgggattaatactttcccatttaggactatatgatctgtttcaggcatttcatttttatagcatatttgtacttgtgtacagcacaaaatcgtaggtactacttgtccagctacgactgcagcaatatgcatgtgtggcatgacatagtatatgatattatagcgttcgaaataaaggaacgttatttacatcggttttatgaggaaccgatgttactataagatacactacatcggtttttttgaaaaccgatgttaccatcagaaaatcaaaaccaataacatcgatttttggaagaaaactgatgttgtggacttttaaatttacatggttcttttataaaaccctaaaaccctttttttttctgaaacttttactctaaatcttctctcgttcttcctcgctttctcggcctcttgctttcccgacgacgactctctcgctctctcgtcttctcgctctccctgttgcgactctctctcagtcactttctcgtcgtcgatttcgcagcagtggcactaaaaatctgaaggttagcatataaatttccactcatataaatttgtgttcttttccactaatataaatttccaattttttatgcgtttttcatattagaagctcagacccagggattttctgtagtttgctccccaacaaggtcttccctttctctctcattcactttgtcatgtatgcttgcaaagataaagatgaaaacttttcttttaagtttgaaaatgccacatctctttgtgttggcacaatctctgatctgttttgttatttttgtttttgcaggaaagaagcagattgtgtcttttgaaatgaacaagaaagatgtcagggtatgccacacaacctattcaaaatcatgttattgttacctgagaatggttccctcaggacgaaaattacgttacctctaggttagatttttgggggttcaagtttcgattttaacatattgatggctcaaagttgaaatggttttattgaatttgcggcatcttgttattccaatgaattataatttcctgatgttcaatagattcattaaaagtattaggtgtttgtttaagtcttttgatatgtcattgttaccccttaattgcagtgaacgtgcagcctctgtcaaggtctcccacaaatttcccagtttacactgcattgcttaaacttcatgaaagaatcatggcacttgatcttcctcatgtggacatctttctcacggacatcaggtactttgaagtgtaaactattcatttcatcttataatgaaatgaaatttatagtgtgtatatggctatttaataattatttaacggtataggatgtttcatcttacaattgatagttttaaataagttgtttctgcttaaaattatatggctgcaaaatatatgaagttttgagctttaatcttgtcataaactttaagttattcctattaaaataaaaagaagctttaagttattgttattggagatggcaaagagtttaagtgactaaactctgaatcgagaactagtctcatagttgccttaagagaccaaaaattgtagcaatatttgggggtcccactagatagccaaagaacttattgttattgttagtattacaaaggggtgtttcgattatgagaaaactggcaaagaaatcttggttggatgcactgatattggtttagaatgttgtgtgcttgcaggatttttgttggttggaactggtcttgtaatgatctagatttagtttttgtgtgtgcttttttatttcataaaatttaattttagataggttgtttcttctgaaaataaggtggttactagttaggaattacatgattctttatccttttctataatattgataagaaaagttgtgttaatgggcatatggattgtgggaaaacgggaagaaaatgattggtctgatgcactgatattggcttggatttgggatgttgtttacagaaatatcctttatagagttatagtttgaaaatttaattgtgattcccttaatgattggtctgatgcactgatattggcttggatttgggatttaggatgttgtcatctgctaatatcattaaatatctcatcttgtttctacatgaccaaagtgattttgttctgaacaagtaaattggttttgtactctgccaattttgttctgtctttgccaaacattagttaggaaaaaaaagacggttttattagcaagttggcaaacttaacctccttttctttggagaaggagaaggtactgtcttgttattagatcgtagtgacctcatgattggaggaatgtttttgctgctgtatttactgaccgcatgattatgtttccatacccaacttggcggccttctgtttaccaagtttgggagcaatcaaacaacactacttgatcttgcttttccggtataagaaccactgccattgctcttcttaccttgatttaaagcttgtgtatttctagcaaggaagttagagttcttgtcttttttctgtaccttcacactattcatagctttgagatagaactaaatcatagttaatattgttatatataaattgtagcttggttgcttctggttccttaaggagttaattatcaatccactattatttgttcttttttcaggataactttggtagactgcatgatcggagcaaagaaacccctaaagtaatgaagcaacttggtcgtcttttcccaaacaaagtgacaatacagctgcctcaggtttgatgttagattaacttcaatatgacatttattccatttctatattcagttcatgtatccattttaaatcaacttgtacaggacgaggatttactttctgattggaagcaacaattagaacgtgatattgaaactataaaaaagctcagtccaatattgtcagcatctgatagtttttaattatgtgccttttttgattttattatcctatgcttcctcttgttgcattttttctgcttatttcaattttttcacttgctgtggattagtgtgatttgcctttggaatatgtggaatctcatgcattggctttgtgaaattttcctaactgcacttagcaatgcttaatgtcattttaaaagttgtttctgtggataaaattctattttgtttcctgctttttcaagcctacccattctggacatccatatccattctttgatttacattgccttttgaataaggccaattaatgttaacaaagtgattacctgattttcatttttcaaataatatagagcttcattctgacctgtacatgacttaagtttcatttcttaaatattaaaattcatttttgccataccatttgtcaaacatctgataagattcttctaatgattcaggttctcaacaggattggattggattgccctgaccttgagactctttgcatcaaagaccaaacccttacaactgaaagtcagttccttttttctattttaatattacatatgaaactatttttccagctaaatataagatgtttagatttgctgccttattactgataaaatcctgtattctttcctgtattctttcataccgtgaaaaattacaaataagttaaagtaggacttaaatatatgtttatggtttcttttaagttagaatttttttttaatttatgtaagtctttttttttaattttagcttttgtaagtattttcttttttaattttagtctttataaaatattttgcttacttttagtttttataaaaaaaattaaaaaaattggtccatgcaagaacaaacttatatgaattatatatgaaaaaaaattaaaatcttacacgaaccaacattaaaacaatatataaacttacaagaattaaaaataagaaaaaaaatcttacggttaaccaaaattaaaaaaatatcaacttacaagcattaaaattaaaaaaaaattataggaataaaaaaatattaatttataggaatcaaaaatatatttaaaccttaaattaactatatataattacaatcacaaatacttcaaaaatcttattgttgctaaaatcataatcgcaaaaacctttgcaataaacatgttgctgaagataaatgaccaatattttttttaaagttcatcgccctagaaattatttaaacttaaaagttctttttcataaactcagcaatgtatttttaattaagctacatctattggatgattaacaaccacaaaccactactctccctatgtcttctcagcttaatttatattattttagtccctgttttctacaatgaacgaaaacacatcttatgcctaaaaattagctctaaggctctaggtgcaaaaattggctctaggcatattggtaggtgggaaaaggtttgtccaaagatgattaaaaaatgcactggtttcttgtggattcttaaaaaaatatcattaatagattaactatgaaaaataccacacgtgctagtaaaagagtaaacataaattgttgcatttcatgttcattgtaatttttaagttgttcgagtgtcacttttttttttatccacaagtattaatctttaatagttaatttttgttagttgagtttcatttgtgataacttggggtgataaatgataactatagcttgcataaattatttgggtgttacaccttatgcattatttattcacatcttcattaagaaattaaataattttcttattaaaaggaaacaaccttgtcaaggtaaaaataaataaaaattcttaaaacttctttttttaataaaataataaatcttgttttaaatgataaaatctgagataggattctattacagatacctagtcaatagataggtgttcttagcattgaagttgttatattatgaattaattagaaatcattctattataaaattgcattgaatatttttaccttataagttaatattgatatttttgtccccatgattactctaaaatttgcttccaagaattgaaagacacttcttgttttcatgattactttgaaattcgttaccatgccatgtccttaaatttgttcatgttgagaataaattgacttgttaatattttagagtttcttatcttttatagtaagttctgaattattaagattatcagaggttcttgcagatcaaatttgctataatcatggtgcactcctatgcctcttgagccagtaaattcaaattannnnnnnnnnnnnnnnnnnnnnnnnnnnnnnnnnnnnnnnnnnnnnnnnnnnnnnnnnnnnnnnnnnnnnnnnnnnnnnnnnnnnnnnnntgttatctccataccttttagatgtaacttttctacttttaatgaatattggcatttttatctaatatgttattaattattgtgaactggattttgttctaatttcatataagcttgaactccatttgtagcttttaatgtatcttttaaaattacaagaatagaaataaagagaataggtcatattttttttaataaaatgatattctaaatcggttatgtgacaaacgatgcagaaagggaatatacaacatcggtttctgagtcaaaatcgatgtagaaaaggatatttctacatcggtttttgatagaaccgatgtagaaatatcattttctacatcggtttataggaaaaccgatgtcgatatataaatttaacattggttttttcaaaagaaccgatgttgaatatgcatattttaatttttttttcattatttcttactatttgacatcggttatttaagaaaaccgatgttgtgtaattatgctaacatcggttttcgaaaccgatgttaacatttgtactttcaacatcgcctatttcaacattggttaaaaatcgatgttgaatgtccaaaataaccgatgttaaaagcattttttctagtagtgtatccttaactatttgtgtcaagccgcattggcatcatattctccaatttcttgccactagaaccttcaatggtcattgtccacttttttagtcatttttgtatacatcttgtttatttgttttccttcctatttttacttcactaaacactttatttcatatctcctattttcactctcattcctattttttctcatttcatccctatcaaacacactttggatgtgctatgtcatttagcttttgttcgctcttactttcttctttctccagttttttcactttcctcattttggcgatcgacactaatgccattcctagtggttttatgttgtggttttgaaaagcaatttaccttttttgcattggttattttggggattctacatcagttgtaaaattgatgtagcaccaactaatgtaaaaaattcaaaataaagaaaattacattggttgtatctagtacttgccaattttcaaaaaaatgaagaatctagatttggatctataccatataaactccatggacaatttcccttaagcaacaatgcactaagcagtgcaagaaaaaacacaaacgaacaaaaaaataagttcatccaaagattacaaaatgattacaactagagagaaaaaaaaaaccaaaaaattatttataacaaaccaaacactagatagagcaagaaaaaaacataagcgaaaaaagagttcatcgaacgatgacaactaagaaaaaaattacaaaatgattacaaatagagaaaaatgaaaaccaagaacttatttaccaaaatgagacaattagaagaaagatacaaaaaaatgattaaagaccaataaatccttcaattctgaagggaaggaacctaatctacaagatctactagatccaacacatcatcacctacatccttggcctccacaagatctttattcttcaacaagatcctcgtcaacatagccgacaatgagtagcacaatccctccatggatgcgcttaaggtcaccattgacatcgagatccaccaatggtgttagagtatctttaataaaagttcttgagatcaagatcccatgtccattagatccaccattattcttactcgagttctccgtgttggagattggattctaggggaagaactcccaagaattcttttttccaaaaaatattattgtttaatgtcttttttcctaactaatttaaatgtagaatctacaaaaagggatctaagaacccaaattggaatctaccactagagcaaaaaataagcaaagtttttgcatcctatatgacattataggacccacaaaaagtggtccaagaatccaaaatgggttcttccattaaagaggctcttgcaagatctatgtcttcaacacccatcttcaaccactactacaaaatgtatatttcaggacgcgcattcaaagacggttgcaataaaaccgtcttaaaatttgaagcggtggcagaattgtaaataattacaataattttaaaacggttataccataaccgtctttaaagcgtattttcaaaaacggtcttttaaggtacccgtccttgaatattttaggttttttatttttcaagttttcattctctctctctctctcatgtgtgccctttttaaacttttcattctctctcgcggttctctgtctcctctggttctcacatacccataccccttctccaaccctctcgcgtctccatcgtggtcgagctcgttgcggcagaggtaatgggaggcgccgccagtgggagatctaggagaagaaggagtggagaacgagggtttcagtccaaccgagggtggtgcggtgagggataacgatagggtttggagtttgcgttggggcgcgtggttgatggaggggtgggagaggtcggggattgtgaccacgagcggtttgtcgttgagggatttgatctctgcggcgtagagggtgaggactagaagtagtgaatatcagcaagactgaggaaaagggcaacgatcatgttcaagaagataagggaagaaagaaaaacaaaaaatcagtgagttgtagatttccaaagataaggaaaatgtttttacgcccgagaaacaggggttgtttttgggcctcctggcacaggaaaaacaatgcttgcaaaggctgtagcaattgaagctggagcaaatttcaaaggtattaatgttgtaaattactattttttgttgtgtatttccttgtatgcttcagtaacaagaaaatatatggttttgtttgttgcagtggtttggtgaaggagagaagtatgtcaaagcagtgttttctctagccagcaaaattgctccaagtgttatttttgttgacggggttgctttatcatgtcatttgtttatcttcctttgaagttcccttttcctttatttaaataattttgtaatactttttagccttcatatgagccatttctggactattttgagaggatagtatgcctatcaaatggggaaagcaaagttatgttttatataataatgtttaagggatgtaaaactttgattattttgagaggatagtatctctgtttctgtgattattttctataaggcaattgaaaaattgtctgaattgaagacctaaacatttaaatctcttcgattttttatgctagctactatggattttcttagtttcaattatctatgtttatttctgtggcaattgtggtaggttgatagtatgctagggagacgtgaaaaccctactgagcatgaggctgtgcgaaaaatgaaaaatgagtttatggtaaattgggatggtctgcgtacaaaaaataaagagcgtgaactttaatgggtttgcattatagtccaatgattggtgatatttttttcactttgatatgaaatgtctttcaggagataagcttagcattgtttcagaacaaacctttacctggattgtgtggcagtggtgacattcatcccttaatgatggatgattttagatatgcacatgagcaggtatattattttatttccaatcttcttaaaataatgtgttcactttggagtatagggtgtcttcaaaagtaagatagctgccttgtgatgcctagttttggaaatatcctttggacattgcggaaagggtgtttataataaatattggcatgaccttataactgcattaccttttttttgtactacaatataaaaagtcatttatactacaatataattttttacaaagtttttcgctttacatgaattaatggcaagtgcgttgtgaatcgaggactgtatggtattttgtattgttcaatttttgtgctattttaatcatgtttcagtgaggtggtggtttgttatgctcggcactttgagaagagacatgacatgcttttggggatgttgtttcagcgtgggacatacaacaagctctatagctatagacaccttataaatgggtttgcagttcatctttccccagaacaggtgatgtctcgtattgttatcttttatgttttgttgtttttgaacttcatgtaagcatgttttgtcctcttgtattagtatgcagaaactcttagacatgctcctggggtgaaatctgttgagagggactggaaagtgaagaagctcacaacacacaccccacaatttttggggcttccaactggggtgtggccaacaagagttgactatgagagggctggagaagacattgtcattggatttgtggactctgggatctaccctcaccatccaagttttactactcataatactgaaccgtatggtccagtttcgaggtatagaggaaaatgtgaagttgatcctcacaatgtttcattgtccttcaacacattgatgttggaaatttctttttggctcattgactctggatgaaaatgtctctgataccaaccgctgatcttgaggcaatacactgaattgcatataagatatgcttcctctgcactgagcagtctttttattttcgaacaataaaactctaacttaatagccaaacattctagttcaacataaacaatcagttatacagtcttatatttttctaagtgttactattttatctcaagatgtgtaattatttatatttgaaaatgaacaggttgtgcattatggggtggatatactcagcctttcagttggaccaaacagttctccatcaaacaccaaaactacctttttgaatccttttgatgctacacttcttggagtagtgaaagctggtgtgtttgtcgcacaggctgcaggaaatggtggtccttttcctaagtcattagtttcatgtagtccatggatagcaactgtaggagtagcaattgatgataatagatataaaaaccatcagatcctcgaaaatggaaaaatcttagtcggacttggattgtcacgtgagttttccaacttcctactatgtttatgtttatttactttttggtttttgaaaatgtttagtccccatgagagccctatgaaataaagaagagaaaagttgtccaatgaaagaagcatgagtcctctgaagaaacaaagaacctagaaacctagccatgacaaccaagatactagagaagaagcaaaagaaacatactattccaggtttgttgttgatttggataacttttagttacttgggttgatttttttcaagaatacaagttattatcatagatttagttattgttttgcttgctcctttttctcattttcttaatatctttggtagagaaagtatagatccaaaaatgaattcatcataaatttagttggaaaaaatgatcgtgtcaatcacagtgcttcatatgattctgtttctaaggatagtagtaagcataaacgtgagggaaaggataggaaaaggcataaaaggtctgagaaaaagtatgcttcacatccaagtttcaagttgttaaacatgctctaaaaacttactgagaaatatcttagcttgttaaggaacttggctttacaaatgttatgtttctttatttattggtaaatgtttgatgtcatatatctttaatgcttcaatttccttcaagcaatttcttaatttttgttttaattattttttgttgtgattttgtgattaccagcgtggcttatgggaaaagaaaacaacaagtctagatgtggcattagccatggatggtgtttcttgttagactgagagccatatttctccgtgcttctctttgtcctttatgtatttatgacttctgcttttcttttttggacaaatgttgcttcatttccattgtttgaaatgcattttatttatttggccaaagaagagagttgaggagtgaggtgaacagaggaatccaagggggggaaaagatatccaattattgtcattgcatatattactattctctgtttgatgtcatgatgcacgtttctttgaatttttctttcttgttttctctcaaaaatatgaatctttcttgtctgatcctttggggccttggttcaaatattctttgtattattgggtgaaaacatgaaaaatcttgctcgggacttccaaatctgtttgaataattaacaggtagtgaaacagcataagaagaagaatgatgcagcaaagggaaggaaccgcacttggtgatattgggaattggaatttgcccaattgccccatcacaaggttttttttactctctctctctctttctttttcacattcaatcaatattaaagtgatatatttttatgatcatttaaggagttttggtgccaaactacttgtcaatgcacaagcaccagcagctgctgaaaaaaaaataacaaagtgaattactctctatattaattgttgtaatggcattactcactagtttctgctcttatttagcggtgaactgaacacttattaaatgaaactatattgttacagttaaaattgtatgcattcaatatgctactgtagcagctctcatggctcggcttgctccaaaagcaaaggtatcaaactcagtgtctttcttttttgttttatctcagtaatgtgtggattccttattcttgttgttgcagtttgcatctggaaggattcttttctttcttttttcctttatagtttcatttctcatttgtcaaggttcttagagatggtaggtggaatgaccaagatgccatatttctcattgccattatttaaaaaaaaaacaaattattattagcttttgaaagaaccaccttttatattcatttaaaaccatattaaaattctgttggaggattttcataaggtttgctattcagtttctttttatttctttatttagtttaatttccttaataaaaattgatttaacctttatatacatacacatatatgttttactacaactttattaaatagttgtatatacccattattaaagcatatgatcgttcttcaacagtgttagttactagtgtatctcctttcctttagctgacataatgtgcttcataatagattttatgccgctgaagtaaaactggaataattcatgaagctgacataatgttcttcaacgcgtaaaactggaagttttatttatttgccaaaacttcacaaatcaaagagttaaaaagaaaatcagttatatttgtaatcaatttcaagaaagagatatctatgattttgtttaaaattttcttttattcttttgcttccatcataatatctgtaattataaaatcctacataaaattaatgttgcttaccgttgtaccatttcttcttctgcaagctaggtgctatgtagattttggtcaatgattcttcaattaaaaagaaaatatagaaatgaaaaaaaagaaaagaaaaggagacacaaactaaaattaaaccgatagagtttggagaggatctagaattctnnnnnnnnnntttaatttccttaataaaaattgatttaacctttatatacatacacatatatgttttactacaactttattaaatagttgtatatacccattattaaagcatatgatcgttcttcaacagtgttagttactagtgtatctcctttcctttagctgacataatgtgcttcataatagattttatgccgctgaagtaaaactggaataattcatgaagctgacataatgttcttcaacgcgtaaaactggaagttttatttatttgccaaaacttcacaaatcaaagagttaaaaagaaaatcagttatatttgtaatcaatttcaagaaagagatatctatgattttgtttaaaattttcttttattcttttgcttccatcataatatctgtaattataaaatcctacataaaattaatgttgcttaccgttgtaccatttcttcttctgcaagctaggtgctatgtagattttggtcaatgattcttcaattaaaaagaaaatatagaaatgaaaaaaaagaaaagaaaaggagacacaaactaaaattaaaccgatagagtttggagaggatctagaattctagatttaaatgttatgtgaaactgtatgtgccgatagctgtcagcttttggagtactacagaagaaagttagccctctgctttgtctggacaagttaactaaaatgatttattttatagtaaattattcttcttgactactttttcttgaaaaatgtcaatatctaataggacaatatgaaactagctttcattgtttttaggaattctttcttgtttgatgtcattgcatatatttactgtcattaaatgaataatataatattataaaattaaacaaataacacttcaacatatatattaaataagtcatctactagtaatatatgtatgaaactatattatatataaattaaatgggagaacaaaactgcatgttagtcactaatatcatgtacggaaaatgaaatctattaaatatttaacatgtacggaagatgaaaatgtaattgcgtgaactttaaattggaaaaaagataaatggacacccatattaaacctagtgagagagataaaaaattgaaaaaaataaatattatagaatttatgatgtgataaaaaagagtaacagaaataaaaaatattaaccaaatatttaaaataaatgatggttgaagtatatcactcctttaaattacagtggaaactttaaattatgtaccagttgttgacctattcctttcattgcagttcattttgcgagcaggaagtagctgcaaaaatctgtgtcaacgaccaatgaaaaatagaaagcaacatgctgactgaaatgaatttaagaggtgaagtgggctggcccttggcctaggatcaaagtaacaactctattcatagactattgcttcctgaacctctaaattatttttggaaactaaaatctgtaatcctcagtgtttctttgtgaatgtgattccttttaaatgaactttattcatcaagttatactcgtgattttagaagggaatatgagactctcaaattgaaattaatatgtggcagccatgcattttggctagttgttattcatctcttgtgtctctctttctttctactttccttgctctcaccacttatcctaacccttgttggtcttctttcttgtatatattaaagattatatgcagccgtcaatgatttaggatatcatcaattggttagccactggtatgacatccagaaaagtgtacaaacttaattctgtttctgttcttaataaggagaaagctatgtttcttgtgcaggttatacactcacgtagtaattgaaccgttcattatagccacaaacaggcagttgagtattcttcacccaatacacaagctcttgaagccacacttcaggtacacaatgcatataaattccttagcttggcacactctcatcaatgcttgaagcttattggagataacagttttccctttctcttcactcttacgttattatttctcttttgatatgttgaccattgttaaattaaggtttagttactcttagttgctgtatttaaaaacatctcatgttagtccctacacatgttattcctagctagttccttttgatcatcaacgtagggattaaaaggaattaaaaatgatatgtgcaaatactcaaaggacatgttaagtatagagaactaaaagggaaagtatttgtagtagggaggaaatgaataattaaacatcagatgaatcagtcacttggatttttatttttaaattactaacaattaatccagattatatattttatataattttttatctaatattttattttaaattttaattagtgccataaggacagctgttagtattcttattaaagttaaccagaaattcaaggaaattaattattccatagctagtatattaggcttgatgttcaataataaatcatggactttatattaataagatgattagaaaccagaaggaaagaaaagctagaaaaataaaaaaataaaagcaaacgaagacggttctagtagccatcgtctttaaagccttacgttctaagacggttatctgagaaccgtcttagaaagtgtaaaaaaaattaaaataaaaaagaaaagcaaacaaagacgggttccattggccaccgtccttaaagccttacattctaagacggttatttgaggaccgtcttagaaagtgtaaagaattaaaaaaaaaagaaaagcatacaaagacgggttttattagggaccgtctttaaagccttacattctaagacggttatctgagaaccgtcttagaaagggtaaaaaaatttaaaaaaaaaagaaaagaaaaacatacaaagacggtctaggaaccgtcttggaaagcggccactttcaaagtcgtttcgttcaaggacgggtccagaaccgtcttagaatgggtttgagaaccgtcttagattccgctttttgtagtagtgaacaatagtgacaacatccgcatcaagatccctaagaggagaatatcaagatcctcattttcaacacccatcattgaggtctgtgtctttgagagggtggcagggtggtgctgggggcaaagtagggtggtgcacgaggctgtaagagaagagagatgccagggtgcgagggtagggaattgctaatccttgaaaatgtcaaaagaagggtttacgggtggggaattgcaaagttaatcgaggacggtgcgtggggatcaaaatgaagtaaaggatttgagtgtatggatttgcaagaatgatttttcatcaattataaaattaactgatgttaaaaaagtactttcaacatcggttaatttaataaccgatgaaaaatggtatacttatttacaaaaatcacattgttttactttctacatcgattgttaaacaaccaatatagaatgcttggcataaaagactattttgtagaagtgtccattaaaaaaaaaaaaaaaactcaactaaaaacctacttgatcgaaccctagcaacatattgcattttgtctcattttggttaagcacaagatgttgctttagattaaaaaaaaaatatttaatttttatctctgttgtgagaaatgttagctatgagttggttgtaactttttttttaggaaagacttggttgtaacattatcggcctacaaaattcacattttataaaggtatgataaattttgtttgcgagataaatagtctttttttcaggtctgtatttgatccacaaaacttcatgaatgaaggaatcggtctgtgagtccaaatagtaatataaaaaaaattaaaatctatcagactagaagattatttttctttcatcttttaagctaaaatctactaaattaaaatatatcaacatttgtaactaaaatatatcaagatttatatcaacaacaaacattcaaatcttataaattaaatattaaagtaacatgtcttatgcggatttggctttcacggattgggtccaaaattacctatagttacatgatttttttttataaaaaatctattatccacattattcgagaatttaacgggctggttcacgaattttgttaagtttacccacttctatttagaagcgaaaatttgtcaaatacatatgaacttaggaagggtgtcaatttaaagggttaatataagtctcatgtaacaccccgtgtatacccggtgtattaacattatataatcatcagattagcgcttaaacaagttaattaaaacctttttatatagcggaagcataaaaccgaaaatcatattttctcgatagcaatatgtatggaatcacaacccacatcaagcatcaacaagtccctgcttaaccagatcatacaaaccaaccataggcagaaacacagatatctcaaagctatagatatacaggagggaacataacataaatatataaccgagttatatacaacatcatctgacacccgaggtgtctacaaaagaataagcgtccgagcgctttctgatcccaaggatccttcctcacacgagggcatacatatacatcagagtatacaaagcaactacatgtacatcacatgtcttccctctacaggggtacaaaacataaacaaatgctgagcctagctccaagcatacaaaacaccacaatagctaagctgagctccaagctatcatctgctgcccgaggccaagcaggtaccgtctctactggggcctcccgtcctgagactgctcctctctgccagaagcatcacctgaaaacacaagccccacacggggtaagataaacatctcagtaagctcaggatccctgtaggcatctcctccaccctggctcactcatcatgacataagtcatcaaggtgtcacaaccatctgggccatcccggcctctcatacaatacaaacaagctatccaagctctatgtacggcggaccgagtcaacgccgacctcagtgtgaaaccggaattcacactcgtgcaatcccattgggtgctaacccttcgcatgaacgcacgtatatggtacctccgagactaggccctcaaccgcaacgggagacacctagcttttggtcttagggaatctcagcatcccgggaccgagtcaaccatgagcaaaccaaactaggaggtgcgcttccctcctagggaggtccatatatatcttactggccagaagatctaacaacaggcttaatacaatctcaagcacagatacacgcatgtatatatatgagcatgcaacatccacacaatgcatgagtcatgaatgaaaccactactccctcggagtatggtagagcacaagcaatgggaaacatccccaagggtccagaacttacctggcaaagccgagcttcgcagtttttccctctctctgtggcccacgccactgacacccgcggtgtcacgccctatacaaggcacatacaacataggtatcaacacacaagccatgcaaggcacaagcaaccacggttcacaaccgcatacaatgaaaggactcacaatcctttccaaaccatcaagtcatctaacctatggttcaacaaggcttatcatacacaagccatcaagcaattagcctctcaaggccatcaagaccacaatccaaggctctagcatgttcaaaaatggccaagcaactcagcccaacaacaacacatgcatcacaaagagccatgaaatcaacgttcaccaaattcacttttaagagctaatcctacatcctctcaacattccaaacacatgtttcaacaggacccaaagctaaaacaagctctatcaaaagtgggtcactattcacccaaaaccccaactcacaaatcaagaggtgattctcgagtttcttacctcaaaagacgcaaggaaggcccaaggacgacttcccctagcttgggtactcacgaatcgtcgctgttcctcgccgagatcgagttccacgaacttcccttgagaaagggatcctttgatttgggggttttcaaggtgaaatgaggatggattaaggctcaagaagtgatttccatcacaaaaaaggtttaaggaagtgattttggtgagatatggtgaagaaaccaagcttgggcactcaacaatggaggtgggaggtctgaggaagaagaagagaaggttttgggccccaaaatcgcgaccctcagccttttatagtgggtctgcccgagctgccgcgtggattgcgtcactctggcgctgatcgcgccagctgcaaatccacggcgccaagagcgccatctccggcgccaagagcgccagcctccagaacctctggcgccaagagcgccgacctccagagttacctgcgccaccagcgccactcctggcgccaggagcgctaacctccagcatctccggcgccttcagcgccacacacggcgccactcgcgccaactggaaaaacataagggcctgcagggtggtctggcgccacacgcgtcggcctggcaccacaggcgccaacctgcagagaccacggcgttgggagcgccgctcccgcgccatcagcgcccgatgccaggaactgcggcgccatcagcgccaacccggcgcctgcagcgccatccctctggtccttggcgcgatccgcgccagatctggcgatggccgcgccaaattatgcagaaagcttctgcagagtgtttttctgcataatccagctccaacggcctcaaactcgcgctatacgcgcccagactcgcgccaagcgcgctgggacttagggatatcacatctcacaccaatttcatgtgtttctatattaagaaattaactacgtacgtaacagatttttttattatgtagaagtggttgatgctctaacctgtactgttttgtgttttcctttactctttacgataaagcaaggcaagagtgtgcctaaaattcggacgagaaaaagaaaaggtgcatgatatatgcattatgtatttctcacataaaattaaagaggatgagttatcgaaaaagaaaagaggatgtgcaacataaaatatatatagggtttgtttgaatgtaagtttctctataaatactttaaaaaaaataagaagaaaaaaatgaaatgaatttctccgatccataagtaaaaatgatctctccattagctgattggtaaatctcatctcattttttagagaagttatattagtgaacttctagaaaataactaatggagaacttatttttacttatggagaaattcatcttattttttcctttttattttcttcttttagaagttcttctagtgaagcttacccaaacaagctcatagtagtgtaatataatagttatgactgatgcggttaatttgaaataataacaatattaattatatatggggtatatcccaaaacatataataagaattgatcacgtcctggcatggcgcgacagacgtctatttacgtccagcagaggcgtaactcagcttcatttacgtccagcaggggcgcgactcagcttcattcacgtcctatatggacgtgaccaagccccattcatgccacacagggacgtgattcatcttctctatatataccagccaccccttcttcattccacacttgctattctctctctctaaactctctctctctctctcaattctcatttgaagcttggagcaaggaaggtgcaaggaagaaagcaagtaagtgctggcgaaattgttacttgattattagttagttacttaaattgttactatgttagttgttaattgttagggtttagttagtgacttagattatgaaatagttgttagggtttagttagttgttaattgtttgttgttattttcttacttaaattgttagttagttaattagtgtagtttcttaatttcttttaagttggaaccctaggtttaggattgatgacataggtatttacttaatattagtaggttagttagttaggttagttagttacttagtttagggtttattgtaaaattatttttgttacttaatttcttttaagtttgaaccctaggtttatgattgatgacataggtttttgggttttgacctaggtttagtgaaaccaaataacaaatttagcctaaattgactatttagttatttgttttattttgggaaaaaattgaaaagaaaaataaatgagaaaaaaaggatagattatttttaggttgtttaaaagaaagattaaaaaataatttttttcttgtttgattatgtaaactatagaaagaaacacacacatacataatggcaaaaattcgtaataaaaaaagaagtgtgtaaaaataaaagtaaattagtactttcatttgtaggtagttttatatttagtttttgaaatataaaattgattcttttagtagttatagatttaaaaaaaaagaacttattttaataaaaatacaaaataaagcaaacgagattattattaagtaaagcaaactagacataggtttgttgacttacaatatgattagttagttacttagattatcattaagtaaacactgaagccatatttttaaaattatcgttggtgacttagattattagatagtgacctagattaggaactaggtctagggtttagggtacacatagtgggtgatcgaggttacctgttacttgttagttagtgacttaaattgttagtcagtgattaagattattagatagtgacctagatacataatgaatttgtaaaaataatttgttacttggtgacttaaataatttgtatttgaaattaggtaaaatattctaatataattataaaatatgtagcatattattatggctgagtcgtcgtcatctgagtcacctcgctctggctctgaccgtgagcatgacgctatcgatcccacaacgcatgttcttcccggaccatatagatgggatgtacttcgaaggcgtaggcaatgcactcatatttcacaggcagtatgaaatggggcggatccaagagagctgaagattcgtcgcggaggtagactaattggtggaccccgacccgacgatatcccggacatagtagcccagtatttgactgaggctggtttcatacatgtggctcgaatgaagtttatgcaggtaaaattaacgaatattgttaacctaatcagtttaaattgtaattttgaaatcgatggtttcaaacataatgtatttgaaatgcataatacatgatttacttcgtttttgtatattgatgctgctcttatcagtgctctggtcgagtgttggaggccagagacacacacgttccatatgccgcagggtgagatgacgattaccttgcaagatgttgccggtattctaggattgcctactgatgggcaagccgttatcggatggacctacacagattggtccgaactgtgtaacgaggtctttggtaacggccttgatccggaagccgagttatgcaccggcaatttgaagttatcatatttcgacagagtatatgctgcgtggcaagttgttgccgggaaccctcaaaatgtgacatacttcacgaaggctcacattgctcgaatgttaggagcctcactgttatgcgacagatcagggggagcgtggttggatgtcggtacatcgccttacttgctggtgactttgccgacattggttcatatagttgggggtctgcggttctcgcaaacttgtttagacagttgtgcgaatgcacagacccagatagaaaggacattggtgggtgtactgttttgcttcagatttgggcatggctcagatttccaccgattgctcccccgctgcctgctgcgtccgagccagaccgccacttcggacacaggtatgtttgtttattgtgtgttactagaatgattgtctatttatgcgcgctacatttgacgattgaatgtttaatctgtgtattagatttaatgtcttacgttgcttcagctcgaactcattgatattttatcaggacaggctagacagcctaagtagagaggaggtatgtgtttttaaataaatactgttcagctttaaatggatgtgaatatgcaactgactcgtacatatgattaaattttgtaggtggtttggcaaccttacggtgattacgattttatgggtgcatctgctgagacacaacgtctgtggatggctaggacacctataatttgttttcacattgctgagtattcacaacctgatcgatgcatgaggcaattcagacgggatcaactaattcctcacagggctggaaaactgaagggggttcatgattatacccttcggggtaaagcccaagaaaattgggctcgtaagcttagaaaattcattcagcgatgggataggagaggtgaacacgtggacgtgcctccgccaatacttggtctgatgtcacccaaccatgagtatttggtgtaatatagactctccgggaaacgatacgtgacaaagcagggggccagattaggacactctgtaagtaacttaaccagaatatttattattcaattatttgatatagttgtttatgtaaaaatgttatgttgtggcttataggttgatggtctggagaatttgtattttgtgacgacgcctgaccaatttggaaactacggtttagtgtatgtgcacgacgaaataggtcgcatgattgatgttttcagagagtcagttcgggtgtctgagtcaggtccagaggcaccgctgtcccaacttccggatgagccccaattatcgctcgacgttgggcgtcatgtgaaagagggtcgagggttaggacgctgtcgatgtcgtttgacacctgttcccgagcctattcatgcatccacgccatgcacgagtggatggatcaggccacccaacattgttcatcaggcatatttcgaccctacccaggcagaggctgatacatgttatcgctcggagcccccaccgatggccacaaaagcccgcttacataccaagtgagtccagtgtcgctggcattcggggatcaggcagggacgagtgtcgcattcgggcatcaggcagggacgagttcttcaggcttcaatgactcgcgtggtacagatgaggacaacttgtatggtcaaatgaattttgaagcaggcaagccatattatcctccacagatgtcggtcgacgccactccacctccatatcatatgccagatcagtattcgcgtggacgtggtagacgcatattgccagatcatgaggcgcatcattatcagtggcctcctccatcatagagtttatattttgttatttaacttagtttccattttttgtatttggctatgtaattttgtaacatgttatgaaatatgtcatttgcaccgtttacgttatttaacattagctcatatacttacactattcaaaaaacaaaattaaaagtaaataatggcagaagatagattcctgaaatgagaaaaaacatggaggttcttgtgaaataagatcttaaaacattaaggtaagggtttatggattgcaccagttaacagcatctttagagttcagggtttagggttgatgttgtgatgagggtttaggggttgggttacatacttagggtttatggattccggttcagggaattttccatggacctatctatttctgcaattgatgataacaagttgatatactccaacacattatcagaaaattgtgtatattcaatccctataacattcaataattgtaaagtgttctttgctgcctctgtcatggactcgtgctcatgaagatccaaagtctctagatcaatgagaagtcgttgctgtgtaaacaagctgggttgggtttgtcgattacctttgctgatagcaagctggttacattcaataggaccatcaggaatacttgtctatttacgaacaattattggattataggatgggataacacctgtgatgatgaaagatagaatgaaagtcgacgtaaagacataaaactattcaaatcatactcacaaaccctaatcatttaaaccaagatacccgtaactcataaatccacacaccataaacacttaataattaacctcaatgtcactgatatgtagaatgatagtgacaacaccgacgacattgacaacactatgtggacattgacaacacttaataattcactggtctgtcagacgacattgacaagaatatggcacgactagactttagtcacgccccattcaggcgcaactaatcacgccccacataggcgggccttaacaccgttatatatacaccacatacgagttgaatcatcgcacacaacttacctcggcaaacgaaactgaatccagtttgcaatggccttcctaggtgaaacatgctctcaaaacattggtaattccaagttagcatttatttttccaaatggatccatcttacacaacgaaactggtgtttctttcgtatgtgatgctcccataccaatgcgagttcccgatgaatgttccttccagtcactgaagagtagaatgcacaacacccttctgctcatagatgaccattctgttgatgaaatttactatcgacaaccgtccatcaacacaggcaacgaaattgtttttcattcactgcaaataaaaaatgatgatgatgtttgcactatgttggtgtgccatgaaaaactggcgtctgttggtcctataaaattattatgtatcattagcagaacacccgatggtgtcctcaacctacttcggtccaccatcattcctactcatgatgcgctgttgtattacaacggcaagtgcaacataccacgacgaggcaattttctgggttactcctttactggaacaaatctagtccgatttgaaattccttccggatgcaatatacaaacactgaaggatataatcaagcaagttgctccgccaggagttcccccctacggaattcatgaatcacaagttgtcagacatttgttcttccgacaaccaggtcacacagagtattcagaaaacttggtcgaatatgaaataaaacaactgaaaaccgatgaagatctacttatggtgttagcagaatctaattactggaagcgtttctgtccaatagaaattttaactacttttaccaaaccggctgcttaaggtgtttatttgtaatgttcagcttattgtgtttgtgtctgtaattccgctgtttgtaccttgtgttgttttatcatctttccatggttatttttgactatgtaagcgtatatgaaaattcacatgagtgttgcaatggaagtttaatttattttcaaatgttcattacgaaatatataacaacattaacaaaacgttcacaacaacatcaggtaatcatgaggttgatggacgaccaggacaatttcgatggttatgaccgggtaatctgcatatcccacacctaacgcgactttggctagcttcgacttcatccatctcattgcaaattctagttgacttgggacggccctttgcacgtagcattgacctgtcaggtatgacaactggagcatcattgggtggaattgctcgctcgttaccaattggctgccatggatatgagtaagcttgtaccaggtttgttataaggaacacgtcatccacgtattgtgccggtgactgacgaacatgtaaagcggctgctgcagcatgactacaaagatacttgaatgccttaaatttcccacactgacagaaccgctcggggaggttaaccgagtacgatctgtcataaccatcgtcaacctcaaacacagattgctcaacattatatgcacgaacataatgagcagtggcagtggtctcattcgccttcaacatagcaaccacgtttttgcaatgagcatgaagaccttacaattcattaagcgccgatcggcctctgcaaacaaaatattccaccagacggctatatgtgtgcttaaccaacgcggttattggcatgttccttgcacctttcaaaatcctgtttactgactcggccaaatttgttgtcatatgtccatatcttcgtccctcaacatcatatgcacgtgtccatatttttttcggtatgctatcaatccaatttgcaacctcaggactcacatcacgaaacctttcaaaggctatgtcaaaatcaacaatagaaggcgtataacctgcaaagataattaaataacataaacaaatttgttctacatacaaaatgaatacatcatatgttaatcatacctaaattcatgaccgctctcttcaaattctcatttctgaacttttgattaaaattgtttgcaatatgacggaggcaaaatacgtgatacgcatgcggtggttgccacctggggtgcctctcaattgcagacaatatgcttcgatgccgatcaaaaataacacaaatatttgtcttctgtgtaacatgggcacggatgttatccagaaagaattcccaagctcctaatgtctcaccttcaacaatggcaaatgcaagtggcaaacactcattgtttccatcctgagctgtggcaatcaacaatttacccttgtacttgccatatagatgagtgccatcaatttgaataaccggcttacagaaattaaaagcctcacaacattgtctgaaggtccaaaaaatgcgcttaaacacgcgttttccatgaacgattctatgagcggaataataactttttgtttgaagttgataaacagaacctggtgaaaagtgaagcatatattcacaccacctcggcaaaaatgcatatgactcctcccaatcaccgtagataattgccattgctttctgcttcgcataccatgcctttctatatgaaaccttgtatccaaaggaatgagttatcctttcctggaccagtccaattgaacatgatggatcatgctttatcatccctgataataaaaaaaaaggtcatcacgttatcattaataataacaaaatcaatactcctaatcattatcatctcatccaaaaacttacctagtacgagtgaaacaataacactagtatcaagctgtctgtggtcctgataaatgtgatcatttaagcaattgtgatccccgccccatttggtaaccacccatctttcaccgtacattggtttgattgccctaaccctccaaggacatgcctgtgcatgcgcacgacatctcatgcttaactttgtcgatgtactttcaaccacgacagcttcctgatgctccttaatgaggttccgcttgatttccatttgcacatgttcttttgatgcaaattcttgtttcacaaaccacttgtttcctaatacccatggaccctcaattgaacctaaaccactgttagaatcttgttcaatcggataatcccaatcaatgtaggtgtaatgtgggattccatcccaaaaagtagtattaccctcacctacatatgcaaattcccaaattcattacaataacatgcatacacaataaacaaacatatatgtaagtaactattgtttcgtaatgcacattgactttgttgtggtaaatgagactgccctgcattctcttgtcgttgggtttcaggttctctcacgactaagtaatgatgttcttgtatttcatttgcgtttccacgataatcctcatcatcctccgaaacactagcattctcagcaagaagacgatcttccattgcgatattttcgtcatcgtcatcatcaatatcgtcatccataacccatgtagggtcattttcctcttccatagacaaattagcaactgaaactagagctggagcagcacatgctgatgctccacgagaataattgaaatcaactgaccgcgctggtaaacccacatcctctactcccgcaaaattcacatacaactctaagaaatttttccttgactgattgaagaattctcctattacaaattcaaggtcttcgtcgtctatcactttgatgctgatatatttatcatcgcgccatatccttgcactgaccatagcgatagattgattggcatgtagcgctaacttttgacggatttttccatgcaaatcgtcaatagttgagttgcggttcatacgtattccccttttctccccttcgaaaacaacaccacgtcggctctcacttctgctgccattataatacaaaaccatacgaacaaaatcaccatctccagagatcgcgttatgtatcaccaacaactacaagatcacaaacaatcacgcctgtaacacagaaaaatctatgagcatattatcataatttattcaaattggaacaaaaatctatttgttgttaatgaaaaactaggtcataacctacgtaactagataattctaacctaggccaccaactaattgtaccctaaacctagaacaactaaacctaggtcactaactatttgtttcttaaaccctaaacctaggtcactaatactatagcataaccctaagtcttaacctaagatactacctaattaaaacctagtgattaactattaatattcttagccaactaaacctagaacaactaaatccaggtcactcactatttctttcttaaaccctaaacctaggtcactaatattgtaccataaccctaagtcttaacctaacatattaccttatttaaaacctagtcattaactattaatattctttgccaactaaacctagaacaactaaaataagttttttttagtgttacatggatatagtcaggttatatggatgtcgggatatgttcccgattttatagggttacaggtctatgtatacatggtgcgtttaatccggtacaagacatatatttatggatatgcttactataaatatcaagtcaataaccttgtcatttttctattaatattaatatacgatgaaatctaaccaacaaatttaaatctaaccaaatgacaaatttatactttattttgtattttttttatcaaatacccatcaaagtattcatttagacaacatttaggcaaaacatgattcgatagacagattaaaataagttttttttatttttattttatgtataaggactaaaacaatccattttaaatttcaaaaactaagtatgaaaatacctaaaatttaaaagacaaattatatttaaacattaaaaatattaaaattctcttttaaacaatgcgttttaatctttcttttaaacaacctaaaaataagctatccttttttttctcctttatttttcttttgacttttttccccaaaataaagtataaatttgtcatttggtttcactttagcccttagaattaatggaatttcaaaagttctcaaaataataacttgtcactcattttaatcaaaagttatatgtaaagtttatcttaaccctaaacatagatctaaacccaaaacctatgtcatcaaccctaaacctaggtaaccaacaatttgttgcttaaaccctaaatatatgtcataacctactaatataatatatcatgcaatttcaaaaactaactaaccttgtcataacctacttcataatctaagacactaactaataatctaagaaactaacaatttaagtcacaaattaataacattgtaacccaaataaaataaaaaatatttcaacatgacttacttggtttatataaagcttctttgcaccttcttttccttgcaccaagcctcaaatgcagcccttttgtagagagaatctagagggaaaaaatgtagagaaagagagtagcaagtgcagtgtgggatccggttggtgccccttttatacaagtctcttggtcacgtccatgtggggcgtcaatgaagtccaaatacgtccctgtgagatgtgatacgacactgggttgcgcctggcttggacgtgaatggagcatggattatgcctctccacgacgtgattgaacacgtctgacctggacgtgaatagcttgctaatcgcgccctcctgtgacgtatctgaacccgccatggctgagcgcaattggttcctgattgcgtcctgtgtgcacatgaataatcacgttcattatggatgtatttaacaaccatagatccggaaataagtttgaaaatgctatcttggtgtaatttttttttaaactataatattataattttttttgcctaagaattgttacctgttgggaaggctttttcatgatgatgatgtttcatgtatcagatgtcgttgtaaatgaaaaatgatgtaacgacccgtatgcatccggttcattaacattgatttatggtcattgcgcaacaattattacagattatcaaataggaagcaataaacaaaatgacatcatcaaacgtcagaacaacacgcactgtacattatatatggtgaattctcataatatacactgtatatgtctcaaaactgtacatatcactcatcaattacaacacacatgcataaaacaaaaatagagccaacatgctctccaacactatgcctaaggttcttatagaatctatccctgctcgggcctcttgccctgagatctatcagtcgctccctgagcatcacctaaaaaacataatccccaacaggggtgagataaaaatctcagtaaattcagggtccttggaggtttttccctcaccctgattcactttcatgcacatatatcaaaattggcatcacaattaatcatcacagttatcaaaccataatatcacatgtacatagcataatacttatatatcaattcctgaggaggcttcatccatctatatgggcacatctcacatcaggagttactaatcatgcctgaggaggcttcatccatttatatgggcacatctcacatcaggactttctttctttgcctgaggaggcttcatctaactatgtgggcacatctcagatcaggacttatatatatatatagtctattaaatttaattctactagccagagaatttaatcaatcacataacactgatcacaatgtaaagctcatcgatcacatatacaacactatcacagtgtttagctcatcatatacatgtttccataaaccgtaacacacaatttcaatatacatgcatcatgatatacaataaccataactccctcggagtatggtgaaacacaaacagtgggaaacacttccaagaacaacgagcttacctgctctcaacgctataccggctctccggcttcgtggtcgcaaccaccaacaagatcactatcacgccctacacaaggcataaaacaatcaatcaataatggtcctcagccgttagaatgaaaagaaatgctattcctttccattaaaacctctttcttctctatcttatggttatcaaagctaaccaccttataggcgattcacagaacctcacaggatctatcttggtccaaccaagatcttagagtccccttagactctgcataagctcaattcaatgctctaaccaaaccatataccaaccattatcaaatttgactaaaacagttatttcaacacattttcaccgtttatatttgccttctgaacaacttttgtaaaggcacttaggctcaaatctatcctaacatcttccatttactcaacattcttcctacccatatcaaattcagagtcaaaatcaaatttcatcaaaaatcatatttcaaagtttaatattcatcagagcaacctcctgagcatacttttctaaagaacctaaacctaatttcagccctatcacaaagtggtcactattcatccgaagaacaatttcacaaatcaaatggtaaaacttgagtttcttacctctaaatcgacaaaaaaggctagagaacaatttttccaagcttgaacgtccttaaaacgccttcttttctcctcagaatcaaactttgtgaattttcctagagaactggatctctctgtttgatggttttcagagaaaagtgatgatgaaatctagctcattgactagttcctttcaactttcatgttgggtgtgaagggtttttgtcaacgattgagtgtttaagaagcttctctagttcatcaatgacagaagcagagaaaaggaagaaaggaaagagagagaaggctataggaaagagagagagagaggctattataaatgagacatactttggcattaaaaaataaatacttgctagacatgtcgggtttatgaatgggagtttcaaacttcatgcttcctttctaggcttttggagatcaattttttcagccaactccattttttttgtgtgtgtgagtattaaaaaaagaagaagatattatcagaaaaaactcaaattggcattatcagacacgagttgtgcaaataattatttgtcgatagataggcaaaaggttattatattatatatgatgaaattttcatacccgtcacttcatgtcttcatctatggcctttgagatcttttttacatacatttatcttgtgaattaatttagtttggaatgatctttttggtgtataacatttctgtatgtaaaatcaggaaatggtagaggaagtgtttgcaaattattttggatgattaattctgattttataaaactcattttggttaaaaaatagttttaaagcatttaatatgttttttcttaatcaaaaatataattttacggtagaatataattgagtacaacgaaatggatatataattgaaaaagtaaactagaagaaaacaacaaaatgaaaatataattgcaaacaacaaaatgaagatataattgaaaaagaaatataacacgacaaaagtactcaagcacaaattaaaactgaaaaggcaatcacatattcacatgaatacatctatatacttctgtttgtagcaaggaacacaacttcatttatctaacagctaccaaatagactaagaggaaacagtaactatgttcgttgccagccattatacatgagttgatcgaagacaagaatattaagaatctaagtttcttttgaatgtaaacttcatttctatttgcaaattattttttaatttgagtaaacactcttaattcatctttaaaataattatttgactcaattcaaatttttgaattttttattaaataatattcttttaagattataaatatctaatattttagtcattttatttattaattaagttaaaggattaaagtgtccataattttaatatttgatctaatattgattatataatctaaaattgaatataatggctttccaattttccattttgaactagatatgttccgtgccagacatttcatttttgttgtatagttgtacttatgcatatttatgctacatatatgtccagctacgacagtgcaacatgcatgtgtgacatgacatgacatatgaattatgacccacataccttgcaccacacaaattttagatatttctttcacaaaatctctcccacttcacttgtcacgtttaaaccctaattgattttttaaaaaacaaattatattaaaaatatttattttatatatattaaagtttaaattttaattattattttttaaaataaattatattatgagaaaaatatttatattatatatactaaagattatgatgaagatttattattatttttgaaagagaaaaaaaaccttccccacctctaaataacacacaacagttctggcaaaagcagcaataagcaagtaacattgtatcaatggcttccgaagaatcccatagcattaagcccccaagcgagcattcgaccaccgagctcatcgcgagcgcgaagctggtggcggaggcggcgcagtccgccctaaagaacgagagcgacaaggtggaaaggcaaaggtggcggacgccgcgggtgatcttctgtacgcggcggcgaagtatggaaagcttgatgacaaacaaggcatagggcagtatgttgacaaggctgctgattatctacataattaccaaggtggtggtggtggtggtgctccttctcagcctgcagagtcaaaaggtgaagaaagtggtggtggtggtggtggtggtgggttaggtggtcttgcaaacttggctggaggcttcttcaaaaagtagttcaagagcagtactactcatttcagctaccaattaaataaaacctttgattgttcttccttgaccttgttgtgggatttgaataatttgtatgagatcttaaattcaaatctcattattgtgtaaaaaaaaaaaaacaaaaaagtctttaactttttattttaggtctagtggcagtgagatttggataatatgcatatgaaatcatggattcaaacctggttattctaaaaaaagaagaagaaaaaagaagtctttaatttcttagtactgttgctgttgttcttatgtgatgtaagttgaataaatatgatttggtgattgtactttgtagagttagtgacttttgttcgttcgttcgttcgttctcttacttctaatttcaaacaagagtacttccgactggcttctttttagctaagtacttgcttcccttgtcttgtgtatatatatataattatgatgttaatgttgaattgtgtcgaattttcttctcttataaagtatccttaaattcatgttgaggtatgagaatatgatatggacgtttagaatctcattatctttcttacaagaaaggaataaggaactggctttcaagtatttttttttgtaaaaaaataattaacatgatagtagctagggtggctcaaaatcatcataaataataaaagtaagtctaacacctctattttaaagtgtaattgtttttttttttataaaaaaaatcattttaaaagaatacacgtaataattaattattctaaaaatnnnnnnnnnnnnnnnnnnnnnnnnnnnnnnnnnnnnnnnnnnnnnnnnnnnnnnnnnnnnnnnnnnnnnnnnnnnnnnnnnnnnnnnnnnnnnnnnnnnnnnnnnnnnnnnnnnnnnnnnnnnnnnnnnnnnnnnnnnnnnnnnnnnnnnnnnnnnnnnnnnnnnnnnnnnnnnnnnnnnnnnnnttctaaaaatttgattcctttatttaattggaagagagtgaaactttcaactacctaatacaaactttgtcaaagtaaaattgactacacccagcaaactttgtaagcaatgttgcaatgctcttaagagttaatctcatagcttttcttgtaaggattccgaatcaattaaagacaaaagagtagggaatctaactctttcaacaacaatttaattacatgcgcgatagtgtaggccgtttaataaagtttaagagagtaaatgatatatggcatctaagatatatactaagcaaataatattgcataattgaacatgaaatcatgaatgctgatttaaaagcattaaacaaacgaattgaggaatgagggaggtgtcaagttttaggaattcagaaaaatgtataattaactcttatttaagttttttttgcttaaattcacttattcactgtattattacacttcataggcagaagaaatcaggaagaagcgaagaagtatacattgaaaaagtccaaatgcagagtggttggatggtcacatcacattaaaggaaataaactattgtactattctttgtttcctcaacgacagtggcaaataaaatttttatttatgataaaaaaaaaaaaagtggttaacgcgtttatattataataccttaattcctcaccagctaccatatcaccttcagcatttgactaaagcttcacagatctctgatactatttgcaaaactagagaagaaatggccttagctatggtgggagaggcacttatctctgcttctgtggagatcttgctggataggataacttctacagagtttcgcgatttctttgccaacagaaacctcaatgtttctctcttggatgagctgaagataaagctgttggcgctcaatgctgtgctcaatgatgctgaggagaaacagatcactaaatcagcagtgaaggcatggcttgatgagttgaaagatgctgttttagatgcagaggatttgatggacgaaatcaacacagattctctgaggtgcaaggtggagggagaattaaaaacctttactagccaggtgtggtcatcactttcttctccctttaatcaattctataggagcatgaattccaagtttgaagcaatatctggaaggctagaacattttatgaaacaaaaagatattcttggtttgcaaagtgtttctaggaaagtctcctacaaaacagttacagattcattggttgaatctgttattgttgcaagggaggatgacaaagagaagctactgagcatgcttctctctgatgaagatgagaagaataataacatagaagtgctaacaatattgggcatgggaggtcttggaaaaacaaccttagctcaatgcctttataatgatattgcagtgcagaaacattttgatttgaccacttgggcatgggtatctgatgattttgatgtgtttagggtgacaaagacaattgttgaatctgtcacttctaaaaattgtagtagtactaattttgatgctcttcgtgttgagttgaagaacagcttgaaagataaaaagtttttgcttgtgctcgatgacctttggaacgaaaagtataatgattggcatcacctaatagcaccttttagcggtggaaaaaagggaagtaagattattgtgacaactcgacaacagaaagttgcacaaatgacacatacatatcctgtttatgagttgaaacatctaacagatgacaattgttggtgtatacttgctgaacatgcatttggcaatgaaggttacgatgaatatccaatcctagaagaaattggtaggaaaattgcaaaaaaatgcaatggcctacctttagctgctaaaacattgggaggtcttttgcgatcaaatgttgatgcaaatgaatggaataggattctgaacagcaacttatgggcacatgaagaggtgttaccagctttacacataagttatcttcatctcccagcacatttgaaaagatgtttttcttattgctcaatttttccaaaacaacatttgttggataggaaggagttgattctgttatggatggctgaaggctttcttcaacaaatccacggagagaaagcactggaattagcaggtgatgactactttaatgaattattatcaagatctttaattgaaaaagacaaaactcaagcagaggataagtttcgaatgcatgacctcatctatgatttggctagactaatagctggaaaaaactcttgctacttggaaggtaataaaatctcaggaggtggtcgccaattagcattccattcaagattctttgatgtctctgaaagatttgagggcttgtatgacctaaagtttttgcgcacttttataccactctctaaatatggacttggcggttattgttgtgtaaccaaaaaggtgtcacatgattggttgccaaaactaaaatatttgcgaacattgtccttgcttgactatggaaatatcactgagttgcctgattcaataagcaatttggtgcttttgaggtatcttgacctttcctatacttccatcaaaaggttgcctgatgcaacctttaggctttacaatttgcagactttgaaattgtcaaattgtaaatgccttactcagctgcctgaacagataggaaatttggtcaatctacgccaccttgatattagagacacaaatttgtcggagatgccagcacaaataagcaagctacaagatctccgtgtgttgacttcttttgttgtaggcagagaagatggagtaactatcagagaattaagaaagtttccttacttgcaaggtactctttccattttgaggctacaaaatgttgttgatcccaaggatgcttttcaagctgacttaaagaagaaagagcagattgaggagcttatgttagagtggggcagtgagccacaagattcacaaattgagaaagatgtacttcagaacctgcaaccatcgacaaatttaaagaaactcagcgtaagatactacagtggcacaagctttcctaaatggttgggtgactcttcatattctcatgttatattcctttgcatcactgattgcaactattgcttttcacttccaccatttggacaactaccttctctcaaggagcttgtgataaaacggatgaaaatggtgaacacagttggcgaagaattctactgcaacaatggggtttccctttcatttcaaccatttccattgttggtgagtatcgagttcgaagagatgtcagagtgggaagagtggctaccatttgaaggtgaaggcagcaagtttccttttccttgccttaagcgtttgagtttatcaaaatgccccaagctgagaggaaacttgcccaaccaactaccttcattgacagaggttagtatatcagagtgcaacaggctagaggcaaaatcacatgatctacattggaacacatcaattgaagaaataacgtttagagaagcaggagaagacttgttgtccttgcttgacaacttttcttataggaatctacggattgaaaaatgtgacagcttgtcatctttgccaagaatgatactagctgccaattgtctccaaagtttgactcttaagaatatccggaatttgatttccttcccagccgatggcttgccaacgtcattgcaatcaattgaaatttccaactgtgcgaacttagaatttctgtctcccgaatcatgccacaaatacacatcacttgaatctctgaaaattagcaaaagctgccattccctggcgtccttcccattagatggtttctcttccctacaagatcttacaatctgggaatgtcccaacatggaagcaattactactcaaggcggaacgaatgctctcaaattaactcatctgtatgtttgggattgtaagaaacttaggtcacttccagaacagattcatctccctgcccttcgatggttagagctttctaagcttccagagctaacatcattgcccccaaggtgtttgccttccagtttacaaatgctcgttgttgaagttggaatgctatcatcaatgtctaaacacgagttaggtttcctattccaacgcctcacttctctgtcttgtcttttcattcgtggttatggggaggaagatgttgttaacaccctgttgaaggagtgcttactgcccacttcgctgcaacatctgtccctatggtattttgatgatttaaagttgttggaaggaaaagggctccaacatctcacttccctcagagatcttggcatcaggaattgtaaaagcctcgagtccttgcccgtagatcagcttccatcctctctcgaattactgcagatacgtggttgtcctttactagaagcaaggtatcaaagtcggaaagggaaacactggtctaagattgctcacattcctgcgatcaagataaatgatgaagtgataatatgacctgtggcatgagtaggaagtaggaaccatccagaaggtaaaagaaggcttcaattattatattatatttttatttctacttcatcacttcaaattttaatgtggtcattatattcttatttctacttcatgatttcaaattttaactgtggtcattatattcttatttcatgatttcaaattttaaatgtggtactttgcatcatggggtttaattttatttgacatttaaataagctaacatggtttaattgaatgaataacacggacgaaccatttattaaattttgtgaattcttaagagttggttaagagttttattttttttggaagaattgtccaaaagttggactataaagtcacattttaatcttgggggaatgtgttgtatggtttctatttctataagttggagactaaaaagagattatttttctgaaaaatagggactacaaattacatatttaaaaaatggagggaataaaattagatgagttattttttaaatactaaacatgaacatatctatatttatatttaacctttttatatttttttgaaagtttcaggcacttatttttcaacttggaacatgtttagataattaaaccttctatttatataaaggttgatattttatattgttgatatagtggagtataagaacctttttatattttgttttcatttgttaaaatgatatattttnnnnnntagagattatctttttttgattttatttctgacttagtatttatgacatatacttagtcatggggtttaattttatttgacatttaaataagctaaaacgggtttaattgaatgaatagtattgaagaacaatttattaaattttgtgaattcttaagagttggccaagactttttttttttttggtaggattgtccaagagttggactataaagtcacattttaatcttgtagaaatgtgttgtgtggttcctatttctataagttagagattaaaaagagattatttttctgaaaaatagggactacaaattacatattgatgggtacttagctataaaaggtaaggtagtcatttgtagatataaaagaaaggataaggcagttagaaattagttatgggatatattataaattgaattaggattgcaagggagaggagagagagaagaagggaaaacaggggttattacgggagtatctcaacggagatctctctcttgtattgtctattgaaacactgtggctacttgaacaattaataaaagaggcatattcagaaaaggcttgacataccttgcatgtacttgctgtgtatgggatattgcagtgcagggtacagaggagagtaggagaattgaaggacccgagtcaggaacccatcacatatttaaaaaatgaagggaataaaattagatgagttattttttaaatactaaacacaaacatgtctatatttatatatttaacccttttataatttttgaaagtttcagggatttatttttcaacttggaacaagtttaaataattaaaccttctatttatataaaggttgatattctatattatcttaatatagtgttgcacaattcttattgataatattgatttggaaatgttgatatagatggttgttgaggtgctgggcacgcaatattggggaccatttcaatcaagctgtcgcttttctttcttactagtgggatggtttctattgaatcatttgaacccaacactagaaatttcttctgtaacatttgtaattggtacaaataaacatgttgtctgttgatgtttttatttttattttattttatgtttttgacaagtaaaagatattttattgttgtggtttgttgatgttaatgttctattatctggttttttcggagtgaaactatcttcgtaaaaccataatgtattggattatatttattatggtgtggcatcatccaagtttatgcataccagtaattggattttgtgttggatggctggatgacgattgatatttgatacctgtttttctttttattaaattgtaagttaaccctgttcatttcttcttatattttccaagttgaataattattttaaaatgttctgattataatacaagcttgcaagggaatgaaatgatatatatatatatatatatatagcattgttataaatccaatttgaactggtcggtcggattgagattcggtagtctaattgggtcgatttcactttcgaatcggttaagcaattgatttggtccaagtcgatcggactgatcattggatcccgattggtccggtccgacttggccaatttttttaaaaaatttgattttttttttaattttacttatatataatagataaatatatataatattgaattctaaatatatattggtttaaatcaggctaattattgactcaccggttggaccactgacccactaaccctttacctcgatcgaatcaatgaccataccagatttcacaactatgattatgggaaaacaatgccaataagttagattataaaatctggtttttgactataaaaaaaaaccaactaatgaaagtgtaacaaattaagcatatatttatgatacaaggaaaaaaaaaatatgtaaaaagatagtttgtatctcctttcaaaatcaatatcatctagcaatccacaattttcggcattataagctttacttaaatgtggtatcaaattcttttaacattggtcatctaattcttttatttttatttgaattttttgtactataataaacttgattacacaaggagtattctcaaattctctttgcatttcctctcccacactaatactcgctccttaatttggtacaacacggcttttataaggacaaaccatataaaataatgttgaataacccaactaatttagtacaaaatattgtatgaacaaattggtcatagtttcatattagcatgttgttaacagaacctcaataagaatgatcttaaatttttttgttgattttgtgagaattaattgtattttttttatttttcttggattcatttgtaatcttagttgtatttttcattctatcagtttgttccattttctatggtaacaaaccattgcttaaagaagaaacgttcgtctagctgactgccaaagcacacttcttcaacaaggcaatcttctttgggtaccaatccctaacaataaaaacaacttaagcacgacagttaattttgctcttataatttcaaatgttaattatgttttttactagataacaaaatttgaattaggtatatattgaagataaagcttattaattcaagatattgcttattgtttaacttgatttccttttctggtggaagaagtttgatgttgctctatttaaagatcaaaacatgcaataagtaataaccctatataaggtttacaatgatacctttaaccatgacctaccaacaaaggatcatcaacaagaatggaatcaaaaccttgaaatcgatacgattcaatatcagttgggtcactcatcattagcataataaccttataaaggtctaaaactcctttctaagtccattatttgtttgccttttgaatcaatcaacagaaaacaacaacatcccaaaaaaacaagcattccactatttcatagtaacaactagcgcaaagacactcattgaataaattttcctgactgacacaacgtacgatgacagcattgaaacttttgcacattggtttgcttgctttcactgcaatattttgttggcaatgggaaatatcggagctacatcaacatgtacctagggtacacaatacaatatatacagaattagtttttgtaacatttttaaattacagtttgtatgaaagaatggtgtattaggagacttgacaaaaaaataaaaataatactttttaataaataatttgaaatttgggactctttgaaaaataattgaaattttgggacagtcaaacatgcctaatttgggcgtgaccactttcgtcgctaattctatcactaacactttttgcgaccaaatattgtggctttttgaatgtttgcgatcacaatattctgtcacaaaaagtgttagcgactgaaatagaaaacgaaattagcgtacgactttaaaatcaattttttaatttacaggataaattttttcaatttttgaaattagtgttgtgaccacaatattgtgattttttaattttttttaactgaaatcgtttaaaaatttacagtataattttgataaatagatataccaaaaaaacattacctaatttgggataattttttattaactttggtttttttataacttaattccataaaaattgtatctattttaattttacgaaacattacttttcatgaaaataacttgtgtttagatacactttttgagtttttgattttggttcaattttttttaagatttgagtcaaaattcaatttaattatttttacatcttaatgtctgcaaaaaaatcgtccaaattaggcatatgatatgtccttcaaacggtcataactttttatagaaatgtctgatcgaggcgtattttatgtcaaaatgctcgaaattaagataagtaattaaaaaaataaaaagtagcattaaattaactaattaaataattaaaaaagtagacaaaaaggaactttttggatgattgaatcccctaaatcctaattttgaggcacttagaggcatgtttttggaaaaaatagttgatcaaatcccctttgggatctgcctaggccttcctctctcaatttcgagcgttttggcataaactacgcatcaatcggacattcctatcaaaagttatgatcgttcaaagtttatatacattgcgcatgcatcacacatgtcacatcctgggaaaagacacctaaattaggcatgtttaaacatgccaaaattcgacatgtttgactgtcctaaaattcaaattattttccaaacaatcccaaattttaaattatttattaaaaaatattatttttatttttttccgagacttcagacatggaaaatttgagttttgcacacatacgagcagaattaggactgctcaagaaagttaacaataggaacacattattatccattgacatgcagaagagtatgttaccaatgtgtgcatgttgtgcaatagcttaaagaaacatctttaaaaacactaacattgactgacatttttaggcagatatgtaacaagtacataaatttgagacaaccttttaaccagtcttaaaaatgtgagaagctaaatttttttgataattaaaaatggtcttcaattgacacaaacaattacaaacaaggtatagacttaagatgttttggaaatgtgggacataagtaaatgctaatttagacaagtaattcgggttttgtaatgtgaaaaactgttatattggaacaaagcctcattaagtagtacaatgcactcattatcttatcacaaccaacagtactgtggtctaaagatttatacctgaatattgtccaactttttttaagaaactttcagtggttcagtcaacacatagtacttttagagaagcaaaccagcagcctctttatcacctttgccttgtatggtgagtatctccctaccaggctttcaactgacagagattgtaccttcagaatcccagacaaaggctcttttctcatataaccagttgaactgcaaagcttgtcctttcctgacaatatacagtagatttaaatatgctaaatcacatcacaataataaacatgagatgaaagaagtatgcatagctagcaacgccctatgagcttcctctaaaccaaaacgtactgacctggctgcatatgtggaggccagaagtacgactgagactggcctgatcggtaaccgggtgcaaaataagtacctgcaggacgaggaggcaaaggtggcacaatgatgggcgaatcagcaacaggcggtgtggcatggtggaggggcaatccctcatgacgagcacgccggttctgccgaaccacccgctgcggtgcctgagtcggacgatcgacatgcgaagctgcaacatcaccaggatcaacgaccctgtccaagtcatcacaggcagcaagtagacgaactgcctcatcatacacctgactcatatcgaaagcattatgcgcctacgactctggagatgtcatgtgcacaataatctcagcacgatccgtctgcatataaagtattagtatgctagtataataataacacaaaacttagctcatacgcatttaaataaaatactaaccacatgcgcattccacgcagctctacgagtcatccatcgacgtgtaacagaaaagtaccattgcatgtactcactgttcacggacaaataaccatctcgcctcatgggggtcaaattctgcaagatgaggccatctctgttcgcctattgggcgatgtaatcctgatgacgatgcctccaatccacctctgacttgccggtgacagtgaccgtcatcaactccatacagttaatcggctcatctaggatatgttggtcaaacccaaattgccgcagaacacgatcaggttgctggtatacgacgagctcaaaacaaattaacggggcaactgccaaccaacgtctagccatttcttcatccactggatgaaccatggctacaatgtcatacgacatccaatgaatctgtctcctacgcatgacatccatataatgacgatatctgcgtatgtgactgaatctggcctgacgcgtggtatacacgttaaacctaccacaacaaaccattagtaacacatttatgataattacttcgaataccaatttagtacaacccttataatgcaatacctgtggccgtaaatctccatctgaagctcatcctgatcctgcacgatcgggaggtcaggcgatatattgggaaatctggtccaagcccacaactgtaacaaaagggcgcaaccacccatatcgcactggctcgcatgtgtagcccggctcaacttcctatacagcgacgcaagcacagctgatccccaactgaaagtgccaatgcgctcgaaatcatctaggaacaacaaataacgagccggcacgaagctcgaagcagtgtcgacgaacaacgtcccgcctagtatgcgcaaaatgagtgcgcgagtgtacctcacacgtccaacttcagtgccagcgtgggcagcatagtcatcgaactggtctcgtaaaaagtgcagccccaataatgctccttgtaaatcacgatctgcagtcggctgaacccctaaaaggtcaccgacaatctccctgtagttgtgtcgtccgtgggttcctgagaccacctcaccatctgtcggcagacccaacagatggtgtacatcctctaagatgatcgtcacctcgtccatactcatgtggaacgtccttgtctcaggacgccatcgctcaaccaatgccgaaacaaggtggtgatcaatctgaaatataacattatacggtaaacacaatgtcataaaaacatcgtatgaactattcaaaacgatggatacctcgtggttgcgcaaacgcgcaacgtggtaaaaacccgcctgcagcagccaagggtgaatgtcctcgggtatggctctatgatcgtgtgtagcagcatgtcgaacatttagcacacgatcgcgcgccgtcggatcttcttgagaatttcacacaatcgtggatacgtgtctttcctgtaacgttaacaacgtgcatacaggtagccccgggacaattacgctcgatgcagcctcactcgctgccggtccggtcgcatgatgctgatccatcgtctatcctaaaacctatattttattataaaaactaaaataatgaatatttaaaaattatatttaatttcaaatttaaaatacaacttaaatttttaatacgatcaaaataatatcttaaatattttaaaaataacttacatactcataaaataagttaaatagttacataaattaacttaacaaaattagtacaacaatttttaaattaaaaaatgaaacaataaatatttacctacaacaaaaaatatttacattcaaaaacattaaaaaccacgtataaaatacttaataaatattaaaaaataacaataactacagtaaaatataaaatacattcaaaacaataaataaataataaatattaacaaaaaacaataaatacattataatacaataaataaaaaatttataatttacatataaaaatcaaatataatcaactaaaattagcaataattaattcgtaaatacaaatccttaaacttcatgtttaaaatttaatgtttaaaaccaaatcaaataataaaaaaaactatcatctatcctacaaattaacaattctatttttaaattacatatcgtctaacctaatgtttcaaacctaatatcttcaaacctaatatctatatattaacaacataattacaatataataaataacaacttacatataatggtcaactaataacaaatcaaaactatcatttatcataaaaaataacaattctatttttaaacaacatatcctctaacctaatgtttcaaccctaacgtctatatgttaataacaaaattacaatataatcaataacaaataaaatgatgaaaaattataaaacctacatataatggtcaaatatcgtcacacaaacactatcatctatactaaaacaacaaatcctctaccctaatgtttcaaccctaacatctacatattaataaaaatataattacaaaataaataacaaataaaataatataaatacacaacttacttgtagcaacaagaaccaaatgatagatgaacaatgtaggaaaaaaaattaaaggatgaatagagagtaaaaaaaacgcagaagaaaaaaagagggaggaagaatggaaagggaagagtgaaagtaaaaaaatttcagtgtttaaattaggttttacgtggcataattcgctagggaccccagcgaattatggccacgtcataaagggggacgtaactgccacgtaatttgctatgggggcaacgaattacgtggcataattcgctgatgggcctagcgaattatggccacgtcataaatggagcagtaactgccacgtaattcgctagagggggcagcgaattacgtggcataattcgcttggtgccatcgcgaattacagggggcctgccacgtggcctgctgtgttagtgcacagactgacgctttgaccacgtaattcgctaccctctccagcgaattacgtggccactatcctgtcgccacatcagcgaacataattcgctacagtggccaacgaattatgccgcgtggcagttctggtatatatttcctttctcgtgacattccggtaaattgttttgggaagtgtggcagtacgattcttgtctccaacataatgtctagaaaatgtatgaagtcaaacacaacattacaggcatatgtaaacacaacactactgtctaccatggatttttcaggggatttgtttcttataaatttaaagatattgagagaatagtcaagctgatggtttactactttttttcatgtttcttttacaggttttccttgttttaggatgactcctgatcctcatgccatgtattttaatctttccttcaataaattaatatttcatccctgacagagaataaaaaaaacaagagtataatagccgagtaaaattcttataattcctgtataaaaaggaatgatacagccatttgtaagtaatatattttattcaaatagagatgctggaacaacatttttaagacactatggagattgatttgtatagttaaaaatttacaacagatacacataattataggagattttgtttcctctaagtaagatatgacttgcattaaaccactgtccaataaatagagaataattggttcagattttcaccaataaccttttttaaaaaaaataataataacaatgacaatgaatttaatagtcatattgacagtaagtttactgcaaaaattttaggcaaaagaacctaaataatacactttaaataagaaattaccaaaaaggggcagtttgcaaactatttacgcatttggggcagtgggtcacgcccagggggaggcacgaccagtcacgcccagaaccaggcgtgaccaagggggtggtcacgcctggttctgggtgtgaccggtcgtgcctccccctaggcgtgacccactctataaatacttgtatgaatcactgactgactataacttaaggcatagaccttaaggcatagaccccaaccactaaaccctaaaccctaaacactaaaccctaaaccataaaccctaaaccatagaccttaagccgtagaccccaacccgtaaaccctaaccctaaaccctaaaccctaaaccctaaccctggtcataaaccctaaaccttaagccatagaccccaacccctaaatcctaaaccctggtcataaaccctagaccttaaggcatagaccccaaccactaaaccctaaccctaaacactaaaccctaaccctaaaaccctagaccataaatcctaaaccctaccactaagccctaaacgctaaccctagtcataaactgtgaaccctaaccctaaaacctcaaccctaaccctaaccctattccatgaaaaataaatcgctaaccctagggattagtgtttagaatggtttagaaagcgactttagttggtgtgcatatcaggaatctccgagtgtctacaattgcaatgaaaatgccatgtgagtgtgggataatcccaattttgatggtgaagtagaaccctttggtcgctgcttgagagtctcagagttggtgggtatggagtgtatacaacagtacttctgaaatcgtgttgttatgcaagtccgaatagaacaggacattcgtcgtatgctagcacattacaatgagaatctttggataagttatactcatccagtgatggatacaaatttgtataacttgtatgaatcactgactgactataacttatccaaggattctcattgtaatgtgctagcatacgacgaatgtcctgttctattcggacttgcataacaacacgatttcagaagtactgttgtatacactccatacccaccaactctgagactctcaagcagcgaccaaagggttctacttcaccatcaaaattgggattatcccacactcacatggcattttcattgcaattgtagacactcggagattcctgatatgcacaccaactaaagtcgctttctaaaccattctaaacactaatccctagggttagcgatttatttttcattttaaatccttcagtttaggtgaattataatacaaccttgtaatttaattacaatacattgatttattaactataaaatagtctcatagatggttgattcatcatcttcggcatcttcacggtctgcttccgatgacgagggtcacacattggatccgacgacccacgttgtgcctaccctatataaatggggggttttgcggaggcgtatccagagatgtcacgtttcacaggcttgtggaacggtgacaaagatcgtgtgttaaagacgcgacgtggcaagatatcagggggcccacactgtgacgatattcctgcaatcgtttcagtgatgttagggcaggcaggatttttacatgtcgcacgcatgcgacatattcaggtataaattttgttattggataattgtacctacaaattgatccgtataaatgtattttattcatatgtttgtcgaactttacttcagatcgatcctccacttatcagtgctttggttgagcggtggagacctgagacacatacctttcatacgccacagggcgagatgaccatcacgttggaagacgtggctggtattttaggtttaggcagtgagggtcaagtcgtcaccggacctacacatgacgactggcccagcattatcgaggaggtatttggtcatccttgtaatatcactaaatttaattaaggtaatttgggtgatatttacgtaattaaacggaattacgaaaggacagtttggtctttgctggaggtacgggtgtagttagtaattgctggacgcacccctatttcttgttaaaaaggagcagattacgttttgtgccatttgcttcttctcttttcttcttttctgatttctctcaactcctaagctctcttcttgccatttgcatgtgattagtggttgaaatcaccaaacaagcaagaaagaaagctctcttctttgttctttgttgtttttgagccttgggtgttggtgatttgaagaaaagagtgggttttgagtctgcccattttcgttcggcgtcgctgaaacgcgagtggaagccatagagtgctggtctaccctccattgtggtgttttgaactctaaggtttgaaatctcctcctatttctccttgattcttgaggttagggttagggtttggagtgagattgatgcatgctgagttttagagggtgagacagttttgatgtatgttttggagtgcgtggaagttgtttttaagttgaaatggtgtttcatgcttgaatcaagcatgtaagttcatgacagccaagaacacgtatttgggcagttctggtgttttgcccataacaggagctatcggtgttcaaatggtatgaaactggtgccatttgaaagctaagagagttagctttactctggaattttcgtgctatttttggagtctcctagaaattgtggtgcagagttataacaggctgttatactctgttttttagcagattttctgctgcagagggtcattttgcagaaagcataactttatctaggatgatccaaattgagtgattccagtggatatagaaagatggatatgtgaacttcattcttgtaaaatatcagctcatttggacaagtaacctggtgtgggttgtcctcgaaagatggctggttgagttggtctgttgctgtcaacactattttgctgtgtgacagttctggtttttggttttctacagaggctgtggttcatggtttttcatgaaaccagttgtgttttaaagataagagatatatcttgatgcctctaaattctcgtgattttaggagcttcccacaaggatttatgatttttccaagtggatgtaaatctgcagaattttatgcagcaatttgtgcttttccgtatgctttgctagagatatatgctttgtacggatagaatggtgttgatatgtgattgtatgccttgttaggacgtgacaccgagggtgtcggtggctggtgccacagagcagggagagaaccgcagagctcggctttgccaggtaagttctggacccttgggatgtttcccacttgtttgtactctaccatactccgagggagtagtggtttcattcatgactcatgcattgtgtggatgttgcatgctcatacatatatatatgtgcttgtagctgtgcttgatattgtattaagcctattgatagatcttctggccagttaagatagatatggacctccctaggagggaagcacacctcctagtttggctggctctagttgactcggtcccaggatgcggagattccctgaggccaagagctaggtggtcccgtcgcggtgcagcctagtctcggaggtaccatatgcgtgcatccatgcgaaggggtagcacccgatgggatggcacgggtgtgaattccggtttcacactgaggtcggcgttgacacggtccgccgtacatagagcaccgggtttgcgtgcattgtatttgtatgagaggccgggatggcccagtgttgtgatgccatgatgttgcgtcatgatgagtgagccagggtggaggagatgcctccagggaccctgagcttactgagatggttatctcaccccgtgtggggcttgtgttttacaggtgatgcttctactagaggggagcagtctcagggcgggaggccccagtagagacggtaccnnnnnnnnnnnnnnnnnnnnnnnnnnnnnnnnnnnnnnnnnatctttgagatatctgtttctgcctatagtttggttgtatgatctggttaagcaggggcatgtttatgcttgttgtgggttgtgattccatacatattgctatcgagaaaatatggttttcggttttatgcttccgcggtaaccttgttttaaaaaggttttaattaactgtgattaagcgctaatctgatgattatataatgttaatacaccgggtatacacggggtgttacattttatggtatcagagcggttttctcgatggaagcattatgtatggatattgtgtgttgctttggactgttgtttgcatttggcatgactattgcatgtgtggatactagttgtgggcctgatcaactcactatttggtatacatgtgtagtgtcatgacgaggtcgagaaacaacagtggggcaaccaatgcccaaccagatccagtggcggctgctttggcggccatgcagcaagagatggctgcaaataggcagatgcaggaggctatgcagcatgagatgactgcaaaccgagaggttaatgaggccttgatgagggccaacagggagatgatggatgagatgcggaccctgagagggggtaaccaggcatcttcagttcctccttcacatcagggtgatggtagccgtcaccaggctagtggtagccatgctagaggaggtcagatgtcccatgctgaggctgctgaggagctcgcagccagagggaagatgcttgttgctttcagaaagcatgaccctcctgtgtttcttggtggatatgaccctgtggcggcagctaggtggctgcaggatttggatcagatcttcactgtgatggagtgtcctgacccacagaggctgctgtatgcgacctatatgttgaggggtgattcccacgagtggtggatcaccacacagcagctgttgacaggccgtggagaggtggtgacctggcctatgtttgaggcttgcttcctggaccgctattttcccagggatgctcgtgagcagaagcaagcagagtttgatggtcttgttcaggggaccatgactgtggatgagtacctggccaagtttaatgagctggccaagtatgctcatttccggagatccttacccgatgctgatatccttgcagcaaagttccagagggggcttagcaagagtattgaggagcgagttgtgggaagtggatcccgtgatatggcgaccttggtgaggcagtgtcgccaggtcgaggacatgcttcgcaggcacagaggcagccagtcttttccctcagacagacaggaagggaagaagaccagtagttctggcccacccggaaagggtaagggcaaggatgtgagagtctccacttcctctaggagattcaagagggattctagccggagcggctcatatgggggaaggcgaaccccaaagtgcactgcttgtggacgagagcattgggggacatgctcctcaggccagattatctgctacaaatgtggccagccaggccatatctccagagagtgcacacagacaggaggccgggcatcagtggctacagttgagatgccagcacccacgactggcagagtatacacagttgatgctagagaggttgccagagcaccagacttgatcagaggtacggttctgatcaatgattgtgatgtgagagtcttgtttgactcgggagctacgcattccttcatttaggatgtgcttgctgttaggcttgagttgcctatgacttgtttttcctctccgatggaggttaccaccgcatctagtgagagatgccgggtgagcacgtgttgcaaggacgtgcggttccagcttgatggcagagagtacataattgatatgtactgcttggctatgcctactttggagatcattctgggtatggattggttagccaagtatggcgtaatgctggattgttgtcagaagagggttgttgtgccttctgacggagctggttccagttccacctctttcctatcagtcttgcaagtgcgtaaggcactcagggaaggagctcagggctacatcttctcatgtgtgatggaagataagccaggtgttggtctgtcgcagatcccggtggttagtgagtttccagacgtgttccctgaggagattactcagctaccacctgagagagagattgagttctccattgatctggttcctggtgtgggaccgatatctgtggcaccttaccgcatggctcctctggagttgagggagcttaaggtgcagttggaggacctgttgtctaagcagttcatcagaccgagtgtctcgccgtggggagcaccggtgatcttcgtgaagaagaaggatggcagtatgaggctctgtgttgattacaggcagttgaataaggttactattaagaataagtatcctttgcctcgtatagatgatctgctagaccagttgagaggagccacgatgttttctaagattgacctgaggtccggatatcaccagattcggatcaagcctgctgacataccaaagacagccttccagtctaggtatggtcactttgagtatcaggtcatcccctttggtttgacgaacgcccctgcagtgttcatggactatatgaacagggtgttcaggcctttcttggatcagtttgtggtggtgtttatagatgacattttgatctattcccagacggaaagagagcatgctgagcaccttaagattgttcttcgaaccttgaggaatgatcagttgtatgccaagttgagcaagtgtgagttctggttatctgaggtgaagttccttggccatgtgatctcagcagctggggtatcagtggaccctagcaagatagaggcattgatgtcttgggagagacctaaggatgtatctgagtttcggagtttccttggcttggccggatactatcggaggtttattcaggggttctcccagatagtgatgcctttgactcgactcacccggaagggggttccgtttgtttggacccatgagtgcgagcagtgctttcaggagttgaaggaaaggttgactacagctccagtgttgacccttcctgaccctgagggaagctttgaggtgtattgtgatgcgtccaagcggggacttggatgtgtgctgatgcaggataagaaggctgttgcctatgcttccaggcaactgaagcctcatgnnnnnnnnnnagtttgcaaactgcccctttttggtaatttcttatttaaagtgtattatttaggttcttttgcagttaaagttatcaatatctacatttcttatgtcctatgttatttgggaatccgttagacctgcaaggctttgatttttattctacaggatctctaatttaggctatattttgttttgatttaattttatttttttagttctcactcatattttaatttatgggaaattttatagtattttaaattttatttctttatactttatttttatacaatttaattattaaaattaagttcctcatttcaaatttcatccaataatatatgaataaaattgttaggtgactttgatttatacaaattggtgtaagaaagataaatatatattaagagacaaaaaaataacttcttgtaaggacnnnnnnnnnnaaggttgactacagctccagtgttgacccttcctgaccctgagggaagctttgaggtgtattgtgatgcgtccaagcggggacttggatgtgtgctgatgcaggataagaaggctgttgcctatgcttccaggcaactgaagcctcatgaggagtcttatcctacccatgatttagagcttgcagccgtggtgtttgctctaaagatttggaggcactatctatatggtgctaagatggtggtgttcagtgaccacaagagtctcaagtacctctttgaccagaaagagctgaatatgagatagaggcggtggatggagtttctcaaagactatgattttgagttgagataccatccaggcaaggctaatgtggttgctgatgctttaagtagaaagcatgtgagtgcagtttgcatgatgatctctgattgtaagttggtggagcagttcagagatatgcaccttaatgtgattgagggtgcccgtggtcttgagttgagcaggatcaaggtgtctaatgatctgattcggaggatccgagaggcacagaagcaagatgatgatgtgagggatatgattggccaacaggatgtttcctgagaggattacgacttggtgttatatcaagatcgtattgtggtgcctaagggcgagttgagggatgtcgtcctagctgaggctcacaagggccaattcagtatccatcccggtgctactaagatgtatcaggacttgaagaggcaattctggtggccggggatgaagaaagacatagccgagtatgtggctaagtgtcttgtgtgtcagaaggtaaagatcgagcatcagagaccatctggtatgttacagcctttagaggtcccggaatggaagtgggataacatttccatggactttgttgtggggttaccgaggactcagggtggatgtgattccatctgggtgattgtggataggctgaccaagtctgctcatttcttgcctgtcagatctgactacacggctgagaagttggccaagttgtatgtcagggagatcgtgaggttgcatggtatccctgatagcatcatcagtgatagagacccgaagttcacctctaggttctggggtgcgcttcaggaagcttttggatcccagctgaggcttagcacagcctatcatcctcagaccgatggtcagactgagaggaccatccagactctggaggacatgttgagagcatgtgccatggagcagggcacgagctgggatagatacttgcctctggtggagttttcctacaacaacagcttccatgctagtttgggcatggccccgtatgaagccttgtatggccgacggtgtaggactccagtgtgttagaccgaggtaggtgagaagcagctccttggacctgagatggttcaagagacgtctgagcagatcaagatgatcagagataagttgctgaaagctcagagtcgtcagaagagctactatgatcatcgacacagacccctgcaatttgatgagggtgatcatgtatttctgagattgtctcaggtcacaggtgtaggacgggctttgggtgtaaggaagctgagtcttaggttcattggtccttatcagattcttcagagagtaggaccagtggcttataggctagctttacctccccagttgtcagggcttcatgatgttttccacgtgtcccagttgaggaagtatgtattagatccttcgcacgtggtggagcctgacaccgttcagattagagagaatctgactagtcctacacgacccttgcggattttggacaggatggaaaagaagatccggagcaaaaccattcccatagttaaggtacaatgggaagggaggacacctgaggaggcgacttggaagcgagagcaggagctgctgcagctatacccagagttgcttgtcaggtatgatttgaattttgcggacaaaattcttaaaaaggtggggtgaaatgtaatatcactaaatttaattaaggtaatttgggtgatatttacgtaattaaacggaattacgaaagggcagtttggtctttgccggaggtacgggtgtagttagtaattgctggacgcacccctatttcttgttaaaaaggagcagattacgttttgtgccatttgcttcttctcttttcttcttttctgatttctctcaactcctaagctctcttcttgccatttgcatgtgattagtggttgaaatcaccaaacaagcaagaaagaaagctctcttctttgttctttgttgtttttgagccttgggtgttggtgatttgaagaaaagagtgggttttgagtctgcccattttcgttcggcgccgctgaaacgtgagtggaagccatagagtgctggtctaccctccattgtggtgttttgaactctaaggtttgaaatctcctcctatttctccttgattcttgaggttagggttagggtttggagtgagattgatgtatgctgagttttagagggtgagacagttttgatgtatgttttgtagtgtgggaagttgtttttaagttgaaatggtgtttcatgcttgaatcaagcatgtaagttcatgacagccaagaacacctatttgggcagttctggtgttttgcccataacaggagctatcggtgttcaaatggtatgaaactggtgccatttgaaagctaagagagttagctttactctggaattttcgtgctatttttggagtctcctagaaattgtggtgcagagttataacagactgttatactctgttttttagcagattttctgctgcagagggtcattttgcagaaagcataactttatctaggatgatccaaattgagtgattccagtggctatagaaagatggatatgtgaacttaattcctgtaaaatatcagctcatttggacaagtaacctggtttgggttatcctcgaaagatggctggttgagttggtctgttgctgtcaacactattttgctgtgtgacagttctggtttttggtttgctacagaggctgtggttcatggtttttcatgaaaccagttgtgttttaaagataagagatatatattgatgcctctaaattctcgtgattttaggagcttcccacaaggatttatgatttttccaagttaagatagatatggacctccctagaagggaagcgcacctcctagtttggctggctctggttgactcggtcccgggatgcggagattccctgaggccaagagctaggtggtcccgtcgcggtgcagcctagtcttggaggtaccatatgcgtgcatccatgcgaaggggtagcacccaatgggatggcacgggtgtgaattccgatttcacactgaggtcggcgttgacacggtccgccgtacatagagcaccgggtttacgtgcattgtatttgtatgagaggccgggatggcccagtgttgtgatgccatgatgttgcgtcatgatgagtgagccagggtggaggagatgcctccagggaccctgagcttactgagatggttatctcaccccgtgtggggcttgtgttttacaggtgatgcttctactagaggggagcagtctcagggcgggaggccccagtagagacggtaccagcttggccttgggcnnnnnnnnnnnnnnnnnnnnnnnnnnnnnnnnnnnnnnnnnnnnnnnnnnnnnnnnnnnnnnnnnnnnnnnnnnnnnnnnnnnnnnnnnnnnnnnnnnnnnnnnnnnnnnnnnnnnnnnnnnnnnnnnnnnnnnnnnnnnnnnnnnnnnnnnnnnnnnnnnnnnnnnnnnnnnnnnnnnnnnnnnnnnnnnnnnnnnnnnnnnnnnnnnnnnnnnnnnnnnnnnnnnnnnnnnnngtatgcttggagctcggctcagcatccgtttatgttttgttgtacccctgttgagggaagacatgtgttgcacatgtgttttgagttgtatatgctcagtttatgtatgccctcgtgtgaggaaggatccgtgggatcagttagcactcggatgctattctttgtatgcacctcgggtgccggatattgtgtaactcggttatgttatatgtgatgttttcctcctgtttatatctttgagatatctgtttctgcctatagtttggttgtatgatctggttaagcaggggcatgtttatgcttgttgtgggttgtgattccatacatattgctatcgagaaaatatggttttcggttttatgcttccgcggtaaccttgttttaaaaaggttttaattaactgtgattaagcgctaatctgatgattatataatgttaatacaccgggtatacacggggtgttacaatcctgctctggagtctgagattaaaggaggatttttgcggctgtcctactttgataggttttacgcccggtgggacgaggtgggaggggaaatcgtcgaagtcgaaaggttttcgaaggcccacatcgcgcgcatgattggagcatggcttttatgcgacagatccggcggaagcactatcggttgtcgctatgtccctttgctagcaggggatatgactgatatatccaggtatagttggggatctgcggtcctcgcacatttgttcagacaaatgtgtgagtgtacagatctagataggagtgacattggtgggtgtcacgtgctactacagatatgggcgtggctcagatttccaccccttgctccagctatacctcagcctactcatcaggagtggcattacggccacaggtatgtgttattttttagttttattaattacctttccacccattagttttattaatgtcatttatttcaaatttaggtttaatgctttacggaggtatattccacacaaccttccatggtatcgggttacgttagattcccttgctcgggatgaggtacgtgatgttatttgctaaaagattggataatttgcatttgtggttttggtaatcattgttcttgtttaattgagtgtttaactgtttttttcaggtcgtatggcagccgtatgcagggtatcatttccttggtgctactgagcatgaacgactgttgtggatggcaactacgccagtgatatgtttccacacagttgaatactctcatcctgaccgatgcatgcgtcagtttggaagggatcagcccatccctagaagcccaaggaagttgacaggcgtccatgatctatccctgcgagggaagcagatggataattggacgcgtaagctccgaccctttattcgtcgttgggatcgtagggaccagcacatagagctacccccccaactgactgggttcatgtcaccaaaccatgagtacatggcttggtacagggagaacgggaaacgctacatcactaagcaggctgcgaagatgggtcgtggtgtaagtgttatttaaattaaatttgtaaagtaattttcattatgatgtcgttattgtattgactaatgaatttgttgtgtaatctgtagcttgatggactggaaatgctatactgtgccagtggcagacaggagtggcctgggttcagcatggactacctgcacgaggaggttggtcggatcatggccatgtttcgacagagctgtaggttggaggagccaggcccagctgcacccccgtcacagcttccagataaagatgacccgcatgtgcaggttcctcgtagccgtcgtgagggacacggactggagcgtcaccggaaagtcaggcgacaagttcctgagattatacccgttcccaggcctcgcgttgaaggttgctataggcctccagtgataggacccacgtacggcagtcaggctttctattaccagtctgctcagccgtcggatatgggccatgaggggttcagtactcagagcgacatgccaccacagtctgagtacgggtcacagcatttgtactacacccctactttggccacgacatcaatggactgtgggactagttcttccatgcctgctccagagtggtctgaagaggacattcagaggctggttaattttggtccggatattcacggagattggtcgacacatggagaatacggcagcccagtttttgatcagcctgacccagcatcccaggatccgatgactgcatgcccaccagtatatacagcccctcctcagccagccccctccgatgcagggccttcacatgcagccccttctcagtcatcacatgctcaggctgagcctcgtcaggcaggatcttctcggcgacgtgttagacaggtgctacccgatcgtcaagcgcgtcattatcagtggccacctgagtcgtagtgtttttatgtatttacatttgtcttattttttgtttgtttgttgtgatgtactttatttgtaatggatcaattaattttttttcgttatgatgtttatttgtatttgattattttggttaacttataatgtagtacaaggatcgtcattagaaactgaacacgtccaacaaatgtaggcgtgattgcacacactcaaatagggcgtgacagcacacgcccaacaattgggggcgtgactgcagacgcccaacttaggcgtaatacaaaacggggtcatgcctacatttgggcgtcatcgaaccttatataaggccgaccatccaacacaaattgcatcgaccactccctcaatcttactacttgtgcctcccttactctgagattgttttactatggcattcttagcagaaacaagcagccaaaccattgttaactcaaaattagccttcatttatccaaatggatcgatgaaacacaacgaaagcggtgtttcttttgaatgtcccaatcctgtaccaatgcgggttcccgaccagtgttcttttgaaacactgaagcgtaggataagcaacaccgttatgataagcggcgaccagtttattgatgaaatatactacagacagccagacctacatgcaggtgagcaatgtttttttcattcttttcaggttacaaatgataacgatgtttgcgtaatgttgatgtgccatgaacaaatgtcgaccattgggcctatagagatattatgcaccataggtagaacgcctgaaggtatagtcaacctgcttcaatccaccatggtcccaacacatgatgcattgctatattacaacgggaagtggaacataccacgacatggcggctttgtgggctatgcattcatgggaacaaatccaatcagacttgacattccttcaggctgcaactttgaaacactgaaggaactgatcaagcaagttgtgcccgttgaacttcccccttatggaatccacaagtcacaggtggttagaaaagtattttttagacagccagcgcatcacgcttattcagacaacacgattgaatatcacataaaagagttgctgagcgatgaagacatcttgaaggtgttagctgaatccaactactggaaacgtttttctccaatacacatcttagctgtttttagcaaacccgaacccgaattggaataagacaaatgtgttacgccacatatgtgaaactattaatttgtgttgttatttacttacttaatgttgttgttgtcttaatcaatgttaaagtgttgtcaaacaactttgttatgcgaattaaggaacacgatgaaatggtaaacatagtctgaaacataatgtcatgcagtaaaatacaaaacatttgtatacagctaatattgtaaacatgaccctaaaatcatgaaacagcacgacgatcaggacaagctctccgattatgcccaacggccttgcaaattccgcatctgcttcgtctttgactggtttcgacttcgtccatttcgttacgaattctggttgccttgggacgaccctttccacgcaacatttccctgttgggtattataactggaccgtcactcggtggaatggcaccttcatgaccaattggctgccatgggattgaataagcctgcaccaaattacttatgaggaacacatcatcgacaaactgaaatggattctgtcgaacatgtaaagcagctgctgtggcgtgactgcatgagtatctgaaggccttaaacttgccacattgacaagaccgttgtccaaggttgactgaataaatagtctcacaaccatccaccacctcaaattctgttcggtcaacattataagtgctgacatggtgggctgtggcaacggtctggttatgcctcatagcatcaaccacatttctgcaatgccgcgctgaaccctcaacttgtgaaagagctgcctgaccccttgttacaaaatattcaaccaatctgctgtacgtgtgtttcaccaaggcagtaataggcatgttcattgctcccttcaacacccgattaactgattcagacaagttcgtcgtcatatggccaaatctcctcccctctacatcatatgcacgcgtccacttttccttggggatgctatcaatccattttgcaacctcagggctactgttacgaaatcgtgcaaacgccagctcaaactcaaccatacacggattataacctgcaaaacaatcatcccattaacattgatctgcttacacaacatgaaacattttaatatcatcacataattgttaaccatacctaaattcatcagcgtcttcttcaaccgttgatttctgaacttttgattaaaattactggcaatatggcggaggcaaaacacatgatgagcataagggggttgccaaccagcatgattcgccacagcagatagtatgctacggtgcctatctgaaatgagacaaatgttttgcctttgagtaacgtgaagacgaatgttagccagaaagtatgaccaggcttccaaggtttccccctcgactatggcaaatgccagtggcaggcattccctgtttccatcctgggttgtggcaatcaataatttccccgtatacttcccatacaaatgagtgccatcaatctgaattattggtttgcaaaaattgaatgcctggcaacactgtccaaacgtccagaacatgcgatgaaacacacgctttcctcgtaccagtcgatttgccacaaaataatcattcgtttgaatatcataaaaagcacctggtgaaaaccgaagcatgtagccacaccacctgggcaaaaatgcatatgattcttcccaattcccgtaaaccattgccattgctttctgcttcgcgaaccaggccttgcgatatgaaactctgaatccaaacgtatgggtgatcctttctcgaaccaatgcaatcgacacagacggttcctccttgatcattcctaacaatgcaaaagtaacagtcacattaaatttaacaattattcaacacatacaaagataattttaaacacacgtacctactacaattgaggcaataacatcagaatcaagctgtctatgaccctgtgaaatatggtcgttaaggcagttgtgattgccaccccatcttgaaacaatccacttctcaccgaacgccggtttaatgaccctaaccctccatggacaaccgtcgttatgagcaatacacctcatgctaaacttgttaggcttgctctcaaccacatatgcctcttgatgctccttcatcaggttccgcttaactgcgacctgtgcgtcctttttggtggcaaattcttgtttaacaaacaacggatcacctaattgccatggaccctgcactgaacccgaacccgaaccggaagcggtataagaatcttcttcgcttggatgactccaatcaatatatgtgtagtagggaattccatcccaaaaaggagtcacctcagcaccttcaaatacaacagtagttgaataaatacaacatgcacactaaaatattaaaacatcaaactattctatttatgttaacatgacttcttaattcatcttactgatgttacataccttcaacaggatgttctgattgtgaacgtcctaggtcgagatgatgatgcattccagacgatcccacatcagtgtctccttggaatgcagttgcatccacaccagcatcatcatcattatccgacgcactagcatcctcttcaagaagacgatcctccattgcaatgttttcatcatcttcatcagacacgtttacaactggatcaacatgtgacgaaccctttgcagcatttacaggaactgtcctaatgggtaacacatcatcttccacaccaaagtccacgtatagctctataaaatctctcgttggcagtttaaaaaattcttcaattagtaattctaggtcttcgtcgtccacaacttgaaaacccatgtaacgttcacgttgccataatctccctgtaagctgtatgatactttggctgtcttgcaaagctaatttttgtcgaatcttctgttgtaaatcactcattgtcgatgttcgcttcaaacgtgtctgtcgtttctccccttcaaaaataacaccttctctgccttcaaatttccttccactataatataacacaacacgtacgaactcgtcgccacatgaactcattttttctttcactcaacaaaaacaaacacttttttgcagagcttcgctgtacacataaattttaaaaaactgtgttagaatatcttgttaacctctaaacccattttttaagccgtataaaccctaaacagtaaaccatataccctaaggcgtataaatcctaaaccctaacccattgtaccataaatcctaacccttattcaaaaaccctaaatttaaccctaatacgtgcaccctcatctgtacaccgtaacccttacattcccaatactaaactctaaaccctaaaccctaaaacataagtagtctaccataaaccctaaaccctaaaccctaaaccctaaaacataagcagtataccataaaccctaacaagtatacacctaaaccctaacaagtatacactaaaccgtaaacgtataccctaaaccctagccagtctaccctaaactaagttatacaacactaaaccctaaacaataaattaactcgtatacataattaatcaaatcacttacttgtgttagcagagcagagcttcgctgcaaaattcactcactacactttttgcaactcgatccaagaatgcgcaacactcagaaatgcaggggaagctgaaaacnnnnnnnnnnnnnnnnnnnnnnnnnnnnnnnnnnnnnnnnnnnnnnnnnnnnnnnnnnnnnnnnnnnnnnnnnnnnnnnnnnnnnnnnnnnnnnnnnnnnnnnnnnnnnnnnnnnnnnnnnnnnnnnnnnnnnnnnnnnnnnnnnnnnnnnnnnnnnnnnnnnnnnnnnnnnnnnnnnnnnnnnnnnnnnnnnnnnnnnnnnnnnnnnnnnnnnnnnnnnnnnnnnnnnnnnnnnnnnnnnnnnnnnnnnnnnnnnnnnnnnnnnnnnnnnnnnnnnnnnnnnnnnnnnnnncccagaaccaggcgtgaccacccccttggtcacgcctggttctggacgtgaccagtcatgccctctcctgggcgtgacccactgccccagatttgtaaatagtttgcaaactgcccctttttggtaatttcttatttaaagtgtattatttaggttcttttgcagttaaagttatcaatatctacatttcttatgtcctatgttatttgggaatccgttagacctgcaaggctttgatttttattctacaggatctctaatttaggctatattttgttttgatttaattttatttttttagttctcactcatattttaatttatgggaaattttatagtattttaaattttatttctttatactttatttttatacaatttaattattaaaattaagttcctcatttcaaatttcatccaataatatatgaataaaattgttaggtgactttgatttatacaaattggtgtaagaaagataaatatatattaagagacaaaaaaataacttcttgtaaggacacatcatcatacaatgtattgtaattacttcaatgtaagaaatcgcgaatcaaaactatcgaccactcctattagtactttattgtcattgtataaatatttatttaaggcaacttaagcacatcctcgaanaaagttttttttttttaaatttttattctccacgtccagtatctttattaataataatcatttaaaatattaccaaattattatcaatttgccacagtatgtcaatttttttaatagtaatctattactttatttttatacactttatacgaataaataaataaattaaaaatttgcaataataaaaaattatatgtaaattattaaaacttttttgaaggaataaattatcataactttaataatataaattattatttttaattaaatataaaaaatgatagccaaaaaattataataatataaaaattagacatgatgaagtttaaacttaatatccgtgcaaggcacaccggattttacgctagtaaattttaattaaaattacacaggttaaattaaagggatcagaagtgtaattattttatttttaaaaaaaaaatcatcttaaaataatacacgtaataagtaattattctaaaaatttgattccgagagagtgaaaccttcaactacctaatgcaaactttgtcaaagtgaaatttgactacacccagcaaactttgtaagcaatgttgttgttccgttcagaaagaacagaactgtttccaataaagaatcgttggaattcttgttatgggattaaactctctctctctctcctgaagatgtctatagttgaagaacacttcagggaagaagatcacacttgctcacagggagaaacaccaatctagatgtggggtgtgtgcaaagtgtgtattgaaaagagagagctagaaaagtgtaccttgtgaatacccggagggttgtatttatattgagaattatggaccttgggtcatagcttgtagataatcttttagataagatattggggagttttgaatatttggattgatttgatagattatcttatcttttatcttggtatcccggtatttccggaacagatgccccccagctcggttgattagcactctgatctgccgagctgcactaagtgcttgtatctttttgatgctaatgagtcgctatagccgaggtgaatgaatcacttttgttgattgtagtggccgaggtgaatgaatttctcgtcggtcgtggtggccgaggtgaatgacctcggtttttatttttctttgtattcaaggctcctggttttatcacccgagatgaccttttggcattggtacctcggacctcgattttgtttttcgcacagcatcgagtttcgactttgccggccgagatggcattctggtgtcatgaccttgggaaattctagattcttctgcgaacgatttctttgtctcttcgtgtttttcaaatgtcctttcaccttctcttcgcatttaatgtgttgtgacaacttttaagtttctaatcatgaccttcttcactttcttccatttttacccacgtacttatcatcgaaaagtcgtattcaccctttatgcctttttgcttctgggagttgctttttcaaaaaacgtttcatatgttggtttttggcggttactattatttcaatccctcttattccaccattcctttttcattcttcattttctcctcgcgtttcgtctactgctctcaagttattatcttttcgtcttcagcattcttcagaaactttcatttttccaggtactatttctatattactgtaacctcttgcattgttttattcattctgtgctttaatcttccatagatcattcttcgtccttttaggtttctgtcctttctttcttcgcccttttcctttcaccatggatgttactcctgaggaggaagctttcgttcgaaagcatgttcctcccaggtctgctttctggttttggggttttcctctttcggaggaagaaaagagaaaagacctattaagggctcgttctgggggttcagggacttcaaagaagccccaatctggattttctgcccgtaggggggcattcgtataagtacagactacagtttgatgacccctttagagattatggctgaaagggcccttgaacaatcttcctctgtaggaacttctggaacttctgggtttaggggtcgctctgtaggaacttctggttttaggggtcgttccaagggtcctcatgcttctagggttaagggttccataaaggattcgctcgatcgtccttgtctgtcttccaccactagttcaaattcatcccccattgttacccctaatccttcaaacactgtcttcgaagttcattatgagccctgctcaaaatgtatggacgagttccattactatgtccatattgggcactatgagtattctggaaagattctagaatcctgtcgccacaacccggtccgaaaggtcatttcgacgacggctaggatgccggatactgaggtccagatgccgacttccatctgtgtcagcttggcatcggctatctcttcagctcttcctacttcaacttctcttccaggtatttatcttctaacttcttttttactcttgtcataggtagctatggatacctcgtctttggaaatgattggcgagtctcagtctactggatctcggcctgatggtccttctcctgatcttgtctccaagtttccttgggtgacttttgaagtacttcgtactttttcatcttcgaccccggagattaccgctgctcttcctgttggtaaccaggatggattttctatcagtctcccttctcctgatgagcccatctgttcttgtgccgagaagggtgggcccaattattttttctttagtattgacgtagttaaacggctgggtgtaacgccccatctaaacatcagggtcattaccaagcataatccgtaatcaaacatataatcaatcagagtttaagcagtttggaagcttaactaaaaacaaaggcatcatcaaatgccgtcatcatataccctgtacatatgtcatggtgaatatacatcaagtttcctgtgtcttgtacaaaactgtacataaacttccctctcaggggtacaaaataaaaccaaagaccacatacaaaatactagagccacaactcgagtcatctagcctatggtttacaagtccaagctatctctgcataggcttcttgccttgggatctatctgctcctcctgaagggtcacctgcaaaacatagtcccacacaaggggtgagatataaaatctcagtaaactcagggcccttgaaggtacttccttcccctggttcactttccaacatatacaaaacatcatcacaattatatcatcaagcaaccacaatctcaagttatcatcctcctggccacaaccaggtgccttaaccgttcgtatcataaatcattatctgaccatattcaggctataactactacctgactacaatcaggttatataccaccacctgaccacaatcaggctatactcatggcataccgcctatcatcacatctaactctgtcctgctgaggctacctctagatgtacagggacatctcctctcaggaggctacatctatacactaggaacatctcatgcctggattcaatcatccacaagaggctacatctgtatatataggaacatctccacttgggaggctacatctatataacaggaacatctcatgtgtctagcggaggcttcatctgtatatatataggaacatctccaacaagaggctacatctatatataacaggcacatctccttctaacgaggctacatctgtgtatataggaacatctccacttggggaggctacatctatatatcacaggaacatctcgtatcctatctcaacacaactgcctgaggaagctacatctgtgcatataggaacatctccacttggggaggctacatctatatatcacaggaacatctcactacaggtcttacacaatctcaagtcatctatcctactaccataggattatatctatccaattctaggattcacaatcaatctaatagttaattacgcctatcacaggctaaatggcccacaaccatgtcaatcaatctcatattacagtattcatattcactacatgccattccctctttaagggttcacatatctttccctctacaaagggttcagcatgcatccaagcatatacaatcaatgtacaacaatccctcatcaaagggttcaattcacattcaatacatatataacatgccctcttcaaaggggttcaatcaacatctatgagcacacacattcaatacatgttcttccctcatcaaagggttcagcacacctaccaagcatgtacattcaatacatataatcccctaatcaaagggttccattcacatttacagcatatcaagaccatacataatatatatatattattccctcgtcaaagggttcctttcatattcacactcaggtcccacatacatataattattcgcataagaaccatccctccactgagagtatggtgaaacacagcaaaggacacacaacaaggtccaggagcttacctgctctaagcaaagcaccggcttccccggtctcgtggctaccaccaccaacggtgtcagcctcacgtcctacatagtcaaacacacaacgtataagcaacggtcctaaaccgttataacgaaaggaactacaatccctttcaactgaacacataaccaatcacttcacaagtgattcaaggaccctcactaggatccctctcgacctaaccaaggccccagagtctctcctaagactccgctcaggctaacacaaagcacatccatgccttagccctaccatgtccaagctcaaacatgcaacccaaactcagctcatgggcaacatctaaaccatcccaagagcattttatcatccactctagggttcacaataatcatgcactcaatcccttactctatacatgcataactagagccaaaatcaaacttcatcaataaagatttctgaaggctctaacatcatcacaacaaccccctgaacacaagtctctataggaccctgggctaattccaaccctatcacaaaagggtcactattcatgcaaacccccaatctcaaaatcaaacggagaaacttgagttttcttacctcaacggcgtcaaagaagaccctaagaccacctccttgagctccggtgtcctttctacgcaatgggtctcagccacactcaagttctctaaactttccctttggggatttcaaaatctcactcaaaggggtttttgatgcaaagggatgagtgattcaagcttcccaagtgtttctctcacaatcaaaagccaagggaaagtgtttcggtcaagaaatatggctcatggaagcttgggatggtcaataatggagtctagggcagaaggaagaagaagaagcatcttttccccttcaatttcgcgttttgggctttaaatagtccctcagcccgacctgtggcaacctagagccttcagcgccacattccagaacctctggcgcgatccgcgctgaacctggcgccatccgcggcagctggaaacttggcgcccctgacgccccatctggcacccatagcatgaacctccagagaccccgcgctcccagcgtaggtctggcgccccaggcgccaccttccagaaactctggcgccatcagcatgagtctggcgctcttggcgccacataccagaaaccatggcgctctcagcgcgagattggcgcccttggcgccatcttccagtgctctggcgcgatcaacgccacatatggcgccgttagcgccgcaaccctgacagggttttctgctaaaagctctcttaatccaagtttaacgcatgattacatactttaagcacatgtttaaaattcaaggcattacactgggcgtccgatttcctttgtcggaattcgagatgcaattcttatcttttcttcgtctagccccctcccagttgcatcccaacggttgggcttttgtgaaagcttttgaggatttggctgaggacttgaatgtcgtctgcgctgttccactttttctttgttttttcaatgtaaataccagtcgtactagtcgagagccttctaaccggaaggggtggacttctcttcgcagtcgtcctaaccatcatctttttactctttattctgattctttaaagaagttcaaaaataattttttcaaagttatcgccgaacccggcaaacatccttttttcctttacggtcctgagttcccaggggtagagtggaagttccctctttactggactcaggatcatcatctactgactccggcctcctaccgtactgatgagtccagcctctccgacatagaggaatcagcccttcttcaaattttatcacaccgggacgcccaaggtctctattatttttgtcatgatgttatgttgtttttcttcttgccatcgtattaatgtcttgttttatttgcagctgctcaaatggaaggttcttcacgccccccaataagccagctggtagctggggtcttcgatacctcaatcggctgcctccatcttccaagaagcgcaaggccaaagacctaagcagcggtcctcgtgtggtgacccctcccaaccaagtgccgccggctactactgccgaggttgaggtggccgaccaagttactatttcatccggggacacagaaaccatcccggcttctgccgaggtccctgctgttgctgctcctcctgcctctactgctgctgttgttgctctcaccccgggatgcctttgggaaaaaggtgttgacgaccttttcccttataccaaagctcccaagaggtttttggattctagtcctttatctgacgaggacatctaagagcttgacgccctgcagctgagtaccttcaagtgtatttcgctgatgctgagcttagcctatttgaagcgccgacacacaaacttgcttgaagagcactgcaagctagaggaggaattgactgcctctcgtgccgagttatctactaccttgggaaagctttccgaggtttgcggtgaactcgaagcgttgaaggggcaatctctttccctgaaggcttctcgtgatgctgcttcagctgaggcttcaagggctctggaggatgctgcctctttggcacaagagcgtgctgactgtaacaccccgtgtgcacccagtgtgttaacatgattataatatcagaaagcataaaatacgctgcggaagcatagaagaatcgcatttcttgatacattatgtgtggtacagtaacatcaacacacatacaactcaaacatctctacatctagcccttattgatccagataatcaaaatcaaaacaaacaatcaaatacaggcagatatcagacatatcaatatagatatggcaggagacagaagctacctcaatatgtatgtatcacaaggagccccaatctctcagcctttagtcaataaactcctagtgctccactctggtgtgattctcaccattgagtccatcactaccttatcagttatccctgcaacataagtcccacgaggggtgagataaaaatctcagtaagcccagggttcttggaggtctttcctccccctggtgcactatcaaacatctttctcatactacatattattcacgcctaacaaggcctgtgccctcaacctctgcattgagagatcatctgtctagtaaatagactctctcaagctccatgagcctaagtctcatctcatatcataactaccagccatctcggctttctcatctcatatttatatgtatttgttatatctgtaacacatatccagggaataagttctctggaacctagtcccacgtctggggcaatcatctgatagacacaactccccagaacctcactgaactctaatcaatgcctgaggaatctctcaactcagggctttcacacacattgcctgaggaatctcttaactcaggactttcatacacaatgcctgaggaatctctcaactcaggacttccacactgagaacctgaataggatcatctgccaatgcaggtacatctactcaggactcatcattcaatacctgaataggatcatctgcccatgcaggtacatctactcaggattggctctatctatgcctgaataggatcatccacctactcgtgggtacatctactcaggacttgccgcccaatacctgaataggctcatccacctactcgtgggtacatctaatcaggatttacatggacgcctatggattgccctaagggagatcatccacctactcgtgggtacgttcccagaggggtccatagtccactattctctggccagagaatgcacacctatcacatactcaaatcacatcataacaagactcataatcannnnnnnnnnnnnnnnnnnnnnnnnnnnnnnnnnnnnnnnnnnnnnnnnnnnnnnnnnnnnnnnnnnnnnnnnnnnnnnnnnnnnnnnnnnnnnnnnnnnnnnnnnnnnnnnnnnnnnnnnnnnnnnnnnnnnnnnnnnnnnnnnnnnnnnnnnnnnnnnnnnnnnnnnnnnnnnnnnnnnnnnnnnnnnnnnnnnnnnnnnnnnnnnnnnnnnnnnnnnnnnnnnnnnnnnnnnnnnnnnnnnnnnnnnnnnnnnnnnnnnnnnnnnnnnnnnnnnnnnnnnnnnnnnnnnnnnnnnnnnnnnnnnnnnnnnnnnnnnnnnnnnnnnnnnnnnnnnnnnnnnnnnnnnnnnnnnnnnnnnnnnnnnnnnnnnnnnnnnnnnnnnnnnnnnnnnnnnnnnnnnnnnnnnnnnnnnnnnnnnnnnnnnnnnnnnnnnnnnnnnnnnnnnnnnnnnnnnnnnnnnnnnnnnnnnnnnnnnnnnnnnnnnnnnnnnnnnnnnnnnnnnnnnnnnnnnnnnnnnnnnnnnnnnnnnnnnnnnnnnnnnnnnnnnnnnnnnnnnnnnnnnnnnnnnnnnnnnnnnnnnnnnnnnnnnnnnnnnnnnnnnnnnnnnnnnnnnnnnnnnnnnnnnnnnnnnnnnnnnnnnnnnnnnnnnnnnnnnnnnnnnnnnnnnnnnnnnnnnnnnnnnnnnnnnnnnnnnnnnnnnnnnnnnnnnnnnnnnnnnnnnnnnnnnnnnnnnnnnnnnnnnnnnnnnnnnnnnnnnnnnnnnnnnnnnnnnnnnnnnnnnnnnnnnnnnnnnnnnggttactattcaccccattacccaaatcaccaattaaacggtgaaagctgagtttcttacctcaaaactgttgaagaaggccggagaatcccttctcctagctccaacatccaagaagcgccttcttctcttctcaacctcagctctctctctgaagaatctcaggaattggggtttctctcaaatcttggctggaacttagctctcacaaggttttctcatgtttattagtgatttggaggtgtttggatgaggtgtgatgaagttatggagcttcccatgcccatcaatggctgcctgggccagaggaagaaggagggttttcccccaaaaaaacgcatagaatggccttttataggcctttcccgcgcctcccacgcctccagcgtggcctcccacgctcttggcgtggctttccagcaaaaatccactttctggagcagttcccacgctcctggcgtggcttcccacgccccaggcgtggagctacagtactgctacagtaacttttttttttttacccacggttattatactgacttgagggtccttttcgagaaatctcaaagggattccgaggacgccaagaaggaggtgaccgagcttcaagaggtggtaagatcggcggtggaggaggctttctccaatgctatagagcaggttcaatgttcgaacccgggaccctctctgaacctggagggagttcattatcgggcatacgttgaagatggtaagctgatcccatacactgaggaggaggaggcttaattttgaaggaccgggatgccgattttatatgtaacttttttattatctttatcatactttagaacaaatttttctctttctaatattatcaacttttttctttgaatgttattctcgtgttcctttgaatgtcgtttcacgtttcttcttatatatcatcgtatcttagtttctcatgaccaagtctatcgtatatcggatttcggccttcggatttaccgaggctaatatcggatctcggattctttattttagattgccgagaattacaacaactgacgtctcttgggattagttcctgagtaagctatgttgaggtcgatgttggacttcggacctcggctattgaataaccgagggccgtgatggccgacgtatcataaccacttgatggaaccgaactcttcagtttccctcgagtaagttataccgacctgatcagggtcgggacaatacgcggaccatcgagatatcgtattgtgcgcacaacatataattcctttaaacaaggattcgtattgactattatttcatgatctcttgtaaatagaagaggaatacatgaatgaatatcgatttattatttcacgatctctgtcaataagagaaattcgtgtatatatatcagcaactcatgtccctatgtaattgatcacgtcaatctagggaaatacatggtcatttattcagtaaaaacgcgaacatgatctcggacaggaatttctagctataatatcttctcaacttgtcgctgttccaagtccgcaatatattcttcccttccagagtctctaaagtataagctccttgcccgagattctgggtgattctgtaagggccttcctaatttggtgccaatttcccttctcgggcgttcttatttccgatgtctgctcttcgcagtaccagatctcctcgttcaaaacttctcggcttcacctttttattaaatttgtgtgccgacatctgcttcatctctatttccctgcgatgagctatctctcggatttcttctatcatttgtaattgttgtcttcttcggcgtgagtcatgcactgttttctccatgagggctggccgatctctacagggatcattgcttcacacccgtacgtcatcctgaacggagtttctaaggtggtagtttggaccgtggtctgatatgcccataacatgtagtacaactgttcgacccaatttgggccggcttcatgtattcgttttctcagtccatccaggatgactttgtttgcggcttccgcttgtccattcgactgagggtgctctactgaagagaaatgatgctttatgtgaaaaccactcatcatctgttggaattttctatcagtgcgtcccgttgtccgtgacgacttcggctggaatcccaaatcttgcaatgatgctacgttcaaaaaacttctggactttggccaaggtgatagtggctataggctcagcctcaatccacttcgtaaaataatcgacagctactatcagccatctcatttgaccttcgattggtttaaatggacttaagaggtccatgccccatttgtagaaaggccatggtgtcgtgatggaggttagctcggttggaggactccatattaccttcgcgtgtttctggcaactgtcacactttcttacgtgctcggtagcatctgtttttactgtaggccaatagtacctggcacggaggacttttagtgctaatgctctagcacccatatgttggccattgacgccttcatgtatttctctgagcacgtattcggcttgatccgggtttaggcataacaacattggggtgtgaaggcccctgcggtataactctccattgacgatggagtacataacgacttctcggatcaacttctttgcttccatctcgtcgtccggtaaaattccttgttctagatagtcaattatggcctttctccattccgtggccgaggcaatgatcataacgcatgctggttaagccacgtcttgttgaatgatggttctgtggcttcccgcgtcttttgtactagccagttttgataatatatctgcccgggtattttcttcccggggtatatgagtgacgctcgcttcttcgaattcgaccatcaactcctttgacttagccaaatatttggccagtaaaggtcctttgacttgatatcttccttctatttgtgccgagacgagttgtgagtcagtgaacactttgaccttcaatgccccctgttctctgatgtatttcaagcctacgatcaatgcttcgtactcggcttggttgttggacgtcgggaagttaagcctcaacgattgttccaatcacgcccccccgggattttcaataatgatcccagctccgcttcctttaaagttagaagatccgtcgacatataatctccatgtcggtatttcttgtgggtttgcagacgtcgaggttagttccaccaggaagtcgggcaatgcctgtgctttgatggtgtgccgagcttcatacttaatgtcgaattctgataattggatggcccagctcatcatccttcctgcaaggtcgggcttatgtaacacctgccgaagtggctgatttgtccttactaccacagtatggctttggaaataaggacgaagtctctttgttgttgtcaaaagagcgaaggccaccttttcaagttttcggtatcgtaattctgagttcttgagagctcgactcacgaaatagactagcagctgggatctatcaacttctctgaccaatacggcacttatagcttcttccccaactgagaggtataagatcaaagtttctcctggatctggttttgataacactggaggtgacgctaggcattttttaatctccaagaatgctgcttcgcatgtcagcgtccacccaattatagcttccttttttagtaatttgaagaaaggaagagccttcttggtcgaccttggcagaaatctcgttagtgccgccattcgtccagttaactgctgtacttcgcgcttgctagtcgggaacttcatgtccaggatagctttacacttgtctggatttgcttctatccctcggtatgtaagcataaaccctaggaatttcccagcttttactccaaaagcacacttcgttggatttagtcgaatatcatgttgtctcagcttctagaatgtttcttccagatctcggatatgatctctttcgacaggtgtcttagtgatcatgtcgtcaacgtatacttctatgtttcatccgagttgatcagcaaagactttgttcatcattctctggtaggtggccccggcgttttttaatccgaaaggcataacattgtagcaatagttggcgttaacgcctcgaaatgctgtcttatctcggtcctctgggtacatcggtatctgattatatccggagtaagcgtccataaatgacagcagctggaatttggttgagctgtccgccagttggtcgatgttcggcatcggatatgagtctttggggcatactttgtttaggtcggtaaaatcgacgtatactctccacttcccattaggtttctttaccatcacaacgttggaaagccatgtagtgtactgaatttctcttatgaagccgacctctaacagttccttaatgtgcttctccagggcttgtctcctctctggatcgagttttcgattcttctgttctattggtttggagccggggtacatagataatttgtggcaacaaaaagttggcttgattccgggtatctcggaagccttccacgcgaatacgtcttggttcttctttatgcactctaacaatctctgtctcatcttgggatcattttgcttgcctatcttggttatcttctcaggtgaatccccaatttggacctcctccaactcgtccactagttctggcctccattcttcatccctcacgtccaactccactaggttgacgggttgccgagacggtagttcttcgtcatgttttgctgagtctcccttccttatccgaggcggagaggaagggctccccttgctttccttcacggtattgtagtagcactgcctggactccttctgatctccgcatatcgtgatgacttggccgaggtttcgtatcattttcattttttgatgcttcgtggacatcattatgtcccatttgtgaagagtcggccttcccgggatgatattgtactctaaagggaaatcggccacaataaacttgacctttcctgatttaaaaccttccttcgttcccagtgtcaactggagatcaataacaccttttaagctggtgccttccccattgaagccgtacaacatggtttgacacggcctcaaatcttcttctttcagattcatcttcttaaaggcgcttaaggtgatgatgtcagccgaactgccattgtcaacgaaaatttttttacccgaaaattggccacgatccctgttatgatgaggccatcttcatggccgggcaccactcctatcatgtcttcttcagtgaaataaattagtgggggagagtttttcttagtttgtttcttgaagctgggttggacctttatcgacattatttctttaagatatctctttcgctgattggccgtgtcacctccaccacccatggatcccgagataacattacattcgaactcgggttacaggaattcgtcgtctttctttttcttcttttcgccttggtttgatcgctattttgatttttttcttttgctctgttgtccttgtgtcttgataacgtattgccgcaatttatcttcacgaataaacttttctatagcgtctcggaggtcccaacattgttctgttttatggcatggaccgttgtggaactcacagaatcgggagtggtctagccctgccttggtgaacactggccgaggacgttccacttttctcatgtctattgaagctacttccctccatatctgggtttgagaagtgttcaacggagcgtacttgtcgtattttgattcgtacttggctctggtgctgagatcaggtaagtttctcggaggttgcccctgatgagtgtatggggggttccgactattatgaactcctccttgatgtcggtttctcggtggtgaagggttttttttaccttccttgggacttgagttagcaatctccatctgttctaactccaagtacctcttcgatcacattctgaactccatgagtgacttcacagggtctttgtagatcgatttggcaaggcaggacgatccgttgagcccagcagatataaggtggacgtgcaccttttcctccaacccttgaacttgcgaagtgacttccttgaatcgatccagatagctttgcaaagttttccctggttgctgacgtatttttcccagggcgaactcagactttggctgccttttgctggttgcaaagttcagcaagaatatgtgtacgaggtcctcgaaatgcctaattgatcttggtggcaaggtgtggaaccacgtctgtgccggcccggtcagcgtagtaacgaagattcgggatatgattcgctcatctataccccggacgcacatttgcatatcaaattcgtcaagatgtacctgaggatcttgactcccgtcatattttgaaaggaatgatccgtcaaagtcctctaagaagtgcgcgttcactattgcatcgacgaatgggctgttattttgctgacctcggcggtattttctctggtatgtgccttcttttctgattagcactgcctcttttccctggttcccttcgatagcacgaaccgggacctcggtttggggggtacgatgtcctaaggatcggataccctcctcggtccagagtgatcgaccgagtccgggtttccctgtccagtagctggacccgagttcccctgctgaggttcctcctgccgacgtctcgccatgtgctgtgactcatgattctcctattctggctcttcatatttctgattcatcgttccatgactcggatgcgatggttttcatcttgcctccgttcatcaacctgggcaagcagagtccgaatgtcttcctaccgctgaagctcatatcgcttctccaaattctcaatcctgatcagaatagaattcagagcgttatggatcacctgcgtcgtgttcggttcatcctcaccaccagataacggattggtggcgggctgacgtggtgctggtatggctggggacgaggcggtgtactatcacattctcttggtttctccgcagtccgtctcgtccttcaacctggtggcttctcgtgttaaccattgtgattgatgggaatcagaatttatcatttcccacagacggggccaatgttccgttcagaaagaatagaagtgtttccaacaaagaatcattggaattcttgctatgggatcaaactctctctctcctgaagatgtctatagttgaagaacacctcaaggaagaagatcacacttgctcacagggagaaacaccacaatctggacgtggggtgtgtgcaaagtgtgtattgaaaagagagagctagaaaagtgtaccttatgaatacccgaagggttgtatttatattgagaattatgggtgatgggtgaggtgacgatgggtgaggtgacgatgggcgccctgagacacggacgtttcatatggcgacgggtgaggcgacgatcaccctggaggatgttcaccatctgttgggcttgcccatagatggtgaggtcgtgtcaggtcgccatggacgccaccagtttcgtgagttggtcggtcaaatgttaggggtgcagcctaattcggggcgtgatctacatggaggcttgttgggttgcattttttgtgagagcagtttaatgattatactgttcatgctgccaccgaggttggacgcatcagatacacgcgtgcccttatactgcgcatattaggcggcatgttgtttgttgacaccgcctccagctatgtgcctgctcgttatttactttttctggacgattttgaacgcaccggtacattttgttggggagcagctgttcttgcagccctatatagggagttatgtagggccactggggcatcccgtcgtgagatggggggttgtgcgttactgttgcagttatgggcttggaccagatttccctccatctctccgccccttccgacgattgttgatcaagatctcctacagcatgagatttacgacaacaggtactgcaactctttgttcgtaataaataatggggagtatatgtggtgggtttggtgatgatattttttatgttgtaggtttaacgtgtaccagacgcgtcaaagcagattcagtcacatacgcagatatcgacattacatggatgtcatgcgtaggagagatattcgctggaggccttatgatattgttgaccagattaacccacctgacgctgacatggatagacgttggatggcagtgtgtccattgatttgcttcgaggtcgttgtatatcagcagcctgaccgtgttctgcgtcagtttggctttgatcagcccatacccgaggacccgattaattgtagtgagctacttacgattaccgttgtggggaagaccgacgttgactggaggcagagacatgggtttcacgttgctcaatgggtaaacagagataaccttgtcctgtagaatgtgagtccgatgaggcgtgatgggtatttatcagtgaacagtgaatacatgcagtggtatttcagtgttacacgacgatggatgacccgtcgagctgcgattaatgtttatgtggtgagtattttatataattaattattatatgattattttagtaacaattggttaatgtttgtacattgagacacaatttttttgcagaatgaccatgcggagaccatcgttcacatggcatcgacggaggcacaggctcagggggctttcaactttgggcagctgcgtcaggaggctgttcgtatcatggctgcatgtgacgagatggataaggtcaccgatccaagggagctggctcctgcttctgtgcaacggcagacccccgctcctcccacagttgcccgcatgaaccgccgtgcccatcacgaggggttaccccttcatcagagtgcccctgctgttgcggatagaccagttgtcctaccagccatgcagtatcgccccccaggcatgtattttgccccaggatacccagctggaggatcacagcagtacttctggcccccgcaagttccagacgcccctccttcccagtatcccccgtggtttacatttcctactacatttccgacatatcccatgtacgtaggtggatctagctcgcagacgccatcggcacagccagcggtgtataggctcgatccgccatccacgtatgcagatccggtatttgcgacgcctgttgcccactccactcatcagatgcaaggggatgaccctgttggtgactttttagcagcaaacatgcagggagacgacgacaccggtgcagacgatgaagatgaggaccctcagccactgatccgcggaaatccggtgaggggtgcacgttaccgctgtcatttatcgccctaccagcacgacatgagccgctgtcagggatattatgacgaccatggagaccaccaatgatgtttagttgttcctatgttgcttgcattgtttttagtcgtttgtttcatggacattactattatcgttatttgttttagtttggatttagttttatggacatgactcattactattatcgttatttgttatagtttggatttagttttatgtttatggtcatttgacatttacgtttgtctaaaattgttgttttggtgatttattagcattgttttcgtttttattaagtacttgcaatatttagttatacataattacgacaactttgaattacaaatgttggtaaacaacttaagtactcgcattatattacgcacaaatcaatgatgttggacacgtgaaggacaatttcgcctattgtgaccaataatgttacaataaccccatttagtttgaatgctgcttccatctcgcaaatccatttcattgcgaatatgtgtagacttaggtcgtcctcttctgcgtcttagcataacatcaggaatgatcggtgattgtccagtaggtggtatgaaatcctcatttctaatgggataccacaacactgaatacacctcagactaacatgcgagtgtaaatacagggtctatatattgagtggcatcaacgtgtatagaccgacatgctgcaaccacatgactacatgggaacctgaatgcagtgaactcaccacactaacattttctttcagatagagacacccaccatttctttcctgcctaatgagttcgtatgttgtacgcttcttgcacctcaaatctggtgtgtagtgcgtcgtatgcaaccacggaatgacttgcggatctttctatcctcgtcaaatacttttgccatgcgactctgatgaattgattccctctacccaactcttcagcaacctcctgacgatgttgcaaaaaatatgccacaagtctagcgtatgtgaaccgaaccagtgacgtgataggaaggtttctagcgcctttgagtaccttgttaaaaacctcagatagatttgttgtcatatgaccaaaccttcgtccctcctcatcataagctagacaccacttctcctttgggattctatcaatccacgcagctatttcaggacttgcttctttgaattgctctaacccagcatcaaaatctaaccgggaagttgtgtaacctacatatacaaaaaacacgttaataaaatgcaatggtgcgggtgtggatgatgtgcatggagttagttgcttacctaacttcttcaattgtttcttcaacgtcatgttcttgaacctgtgattgaagttgctcgccaaatgtcgaatgcaaaaaacatggtatgccatgggtggttgccatctgagtgcttcattgttgaccgccgcgagaatgcctgcatgtcgatcagaaataagacatattccggttttttgcgtaacatgaatgcgaagtaatgccaaaaaccacgaccaattgtcaatattctcggcagaaacaattgcaaatgcaattggaagcacgtaattgttggcgtcaactaatgttgctatgagcagcgtgccacgatatttcccatacaaatgggtaccgttgatgctgataatgggcttgcaatagttaaaaccatcacaacactgcttgaatgtccaaaacaccctcttaaatacccttacactggtatccaattctccatcaacaaagtgttccattgtttccaacttatatgcagacccatgagcaaagttaaccatgtaacccaaccaccttggcagaaaagcatacgagtcatcccaatccccgaataccttcacaacagccttttgctttgctttccaggcctttctgtatgaaatgtgaaatccgagcattgacgagatcctttcttggattaaccctattttaacacttgggtcctcacgaatcatttctgcaatccattacgaaataacatgttacttactttttgccacaaaacaaataaaaataatgaattaaaacaatttcgaattacctagaatcaccgaacatatgaaattagagtcaagctgcttgtgattttgagacagattacgactaacacagctgtgttcgttgttccatatgccaaccatccaatccgtgccacccttttgttggtatgccctcatcctccatgcacaaccctcatgatggttctcacaaaccattataagccttttcgtatcactttttgcaactatgattgtacgatgctcacccatacaatattgctttattgccatttgaacatcgaacttgcttggaaacagctgacccttaaataactcttgaccgatctcccaattaggaatttgcgctccttccatgtcatctaactcctcatctgggtaagcccaattaacattggagtaatgacttgtgttcgaccaaaatggtagattgggctctgctgtataatgacaatttaaacacattgttgtgttcaacttccaaacatttttacagtactaaatagcacacagttttgcattcatacctggaaccggaagcggaccttgcattccgacaatgcccggagaaggcatagcaaaagcacgatcaaaatctccgtctacatccgtatctgatgaatcagtatctggaacaacaccttcatcaacctcttcctcagaactatccaccacaaaatctgcctgctcaccatccacagtttatgtatcttctgccacaaattcttgtgttggttgtgttgctggaggtggtgacaatgatgcttgtgtatcttcgaaatcgaccatcggctctacattaaggtcaatcgaaccaatgtttggtacaacattttgactgcttgactgtccaccgcaattcacttcagcatacaattcaataaatctcggatctcctccgtcggatatgcatgcgtctgtaactaatgatagatcgtcatcatccacaacatccacaccaacccattgcaccggattttcggatgcacatcgagcactcaaacgcgttacagactgaccccgttgtaatctcaacttcttatatatgattttcatcaaatcatcaaagctgcattgcgggggtatacgaaacattttgctctctccttcaaatatttgaccatgaggtccaatatattttctcccattgtaataaacaatggtgatcagaccatttctactactactcattttcaaataactatcaaaagatatacgctctcacttaaaataaaatatcggacactttacaaaatgctggggtgtgggtaaatgctgagggtgtgggtttaaatagggaggggtgttgctgtaattcgctgggtgggctaacaaattaggtaacctaattcgctaggcctgacagcgaattaggtaaagctgccatctggacctatttcgctgtactggacaacgaattaagcaaccaatttcgctacaacagatagcgaattacgccagagctcgccacgtgtcctgtctgcactgccatcatccctgatgctttgaccacgtaattcgctgcacagactagcgaattacgtgtccatttaggttgcgccaaatcagctacttatttcgctggccttcatagcgaaataggacgcgtggcatattggtaaaaattactgttcgcgtggcagttgtgtaaatttttttaaaaaacgtggcacaaatgtcaatgtctctaatataagtctcacaccaatttcatgtgtttctatattaagaaattaactacgtacgtagcacatttttttattatgtagaagtggttgatgctctaacctgtactgttttgtgttttcctcgtctctttacgataaagcaagagagtgcctaaaattcagacgagaaaaagaaaaggtgcatgatatatgcattatgtatctaacataaaattaaagaggatgagttatcgaaaaagaaaagaggatatggcaatataatataatatatatgtatgagttgtttggatgtaaatttttttataaatatttctagaagaaaaaagtaaaaaaaaataaaatgaacttctccataaataaaaataatctctttattagttgctttgtagatctcatctcatcttttagagaaattatattgatgaacttatagaaattaactaataaaaagtttattgttacttatgcaaaaaattatcttattttttttctttttatttcttctttttttaaaaaaatttatccaaataaattctgtaatataatagttatgacataataacaatattaattatatatggggtgtatcccaaaacatataataagaattgttacctgtcgggaaggctttttcatgatgatgatgtttcatgtatcagatgtcgttgtaaatgagaaatgagacatactttggcattaaaaaataaatacttgctagacatgtcgggtttatgaatgggagtttcagggtccgtttggtcggagagaaaatagaaagaaagaaaacatgattaatgaaacatttttttctgtttgtttagagagaaaatggaaagaaaagttattttttagttacaaaaatttaaatttttccttcctttcattttccttctaattcaaattttaaaattttccttccatttttcttccttccatttttttccttcctaaccaaacatagggtcaaacttcatgattcctttctaggcttttggagatcaattttttcagccaactccattttttttgtgtgtgagtattaaaaaaaaaaaaaagaagatattattagaaaaaactcaaattggcattatcagacacgagttgtgcaaataattatttgtcgatagataggcaaaaggttattatattatatatgatgaaattttcatacccgtcacttcatgtcttcatctatggcctttgagatcttttttacatacatttatcttgtgaattaatttagtttggaaggatctttttggtgtataacatttctgtatgtaaaatcaggaaatggtagaggaagtgtttgcaaattattttggatgatcaattctgattttataaaacccattttggttaaaaaatagttttaaagcatttaatatattttttcttaatcaaaaatataattttacggtagaatataattgagtacagcgaaatggatatataattgaaaaagtaaactagaagaaaacaacaaaatgaaaatataattgcaaacaacaaaatgaagatataattgaaaaagaaatataacacgacaaaagtactcaagcacaaattaaaactgaaaaggcagtcacatattcacatgaatacatctatatacttctgtttgtagcaaggaacacaacttcatttatctaacagctaccaaatagactaagaggaaacagtaactatgttcgttgccagccattattcatgagttgatcgaagacaagaatattaagaatctaagtttcttttaaatgtaaacttcatttctatttgcaaattattttttaatttgagtaaacactctcaattcatctctaaaataattatttgactcaattcaaaattttgaattttttattaaataatattcttttaagattgtaaatatataatattttagtcattttatttattaattaagttaaaggattaaagtgtccataattttaatatttgatctaatattttatatgggattacataatctaaaattgaagatcatggatttccaatttttcattttgaactagatattttccattttgatcatgcatatttatgctacatgtccagctacgacagtgcagcaagcatgtgtgacatgacatgacatatgaattctgcgttcaaaattcccacgcactctgcatcagcctctccattcccaacgcagaaaaaaaatgcacacgaacatatttcatgcaactcgaatttagaatattttataagcataaaagatatgtactatcggcgtaagaaactctatataattagttaatttaaaatttattatttatattatttttaagataagttaacaaacttatgacatagataatgtatttatgcgaagcatttgttgttttaagttataaaattgtatttatgatgattctgagcaatgttatgtttgaagatgatggttaggatgcacaagtaaaatcatttaggcatcatgtcaaagttttatagatcattagatattcttaattaaattctaaatccatggttaaatttttctctcttcccaatttttccctttggaaaacccttctctttatctctcttctccctcaaaggacctaacctttttctctgcaccttcaaccccgacgacgtaccaaatcacttcaacgacgccaacatctggaaccttcgcagacctaaaggagcaacaccatgttgggtaattggttgaaacagatattcctttgttccgatgaatacctttgattaaaaaaatgatcttcaccttgattaaaaaaataatacatctaatgattaaaaaactttaccacggtgcttaagttatttcacttgtacaccctatataaacatcgacatgtttgaaaatattactcaatgtttgaaaatatcacttccatgaacatggttgattgtcattaataatttaaaaaataataattaaaaataatgaaaataaaaaatgtgaaagaatgaagtaacaaaaggtcattgtgttagatttcattcctatcaaaataggagatacccacttcttacaagaataaaaagtgaaacaaatataaaattttatattactaataatcaactatttctgaaaatattttttataaaacttactaaatacttcctaagatacatttttggaaatctttcttttaccttcaaagaaaggcctccctagttaaagagtgtgagtatacactcaaacctgtccatgagtttcaagcagcattctataggagttataataattttacttataatataacattaaacacgtgaataaattaacttcaaattatttcaataattagagctcttggattttggattttaaaagaattgtgttaaatagttaagaaaaagaattttactgtgattctataaggctcatataagattatgagccaataaagaataattgcattctaggctaaagataatatttgactagctaacatccagcaaacgttcgtgtatttgactagcattataattcttgccttatggggattcaatattcttacgcagtttttgtacaaattaataatgctgggaatcatgaaaaccttactcgaaatcaaatggaaacacattttataagcaaaaaagacacaacagtattataccacttccaagcaaagatacacttccttctcacaaacatgttattataccactactatatatagggccctctcacatgcataactccctcccatgcatattattttcagccacacacaaacgaagaaccaaccggcctcataaaacaaagacttgacaacgaaattattagatgatctaaaatcaacatcggatatatcatattatccatgatctcattcaataattatgaaacataattattaaacaggaccatgaatggcatgatgagatggaaccatctaataatttctcctgacaaacaacatttatatatatagcactagtgcagtagtatcagttactataaattaaagtactagaacttcattatgttcacttcttattctgatccctacccatgttcatctccatgttcctgttcctattcatgtccatattcttgttcctttcaccgtcaccactgccacgatcagcggttccatggccttcggttggagcgccatacacaggagcaacaccagtagtgccataagcagtactgtattcaaaccccgaggctgcatagttagggccagcatacggtcctcccgtgggtggcgctccgtagccgccactccctatgttcccgtaagcgtagttcgccaccgggtcaatggcggttcggcttccgaactcgtcccgccaccgatcaccctcgtcgttgttcttcacaatgtcgggatggccgtggcggacgtcgtaggccctctggtcggtcccgaactcgtctcgttttttttgttgttgctgtgccatttgaaagagaatattgtgtatgtttttgatggatgtgtgatgtggtttgagagaggtgttgttgtgtgtattatatatatatattgagaggttaagcggtgaggatttagtgcaaatgccaccttaggttattcggcatctgccacgttttgtttggatggattaatcatttaattggactcgcttattgctaacacgtatggtgcacaaattataagaaattcacgtattatgcgaaggaggtcaagcaaggggttttggaatcataaaaggacgaaccatgtataatccacaaaagagatttctaggcgataattgaacccataagaggatataatcttttctgttttctatcaattttccaagttctttcaacatctttcaccttcatgcacggaagattaggtttagagttagaaatattaaaaattaatgaaagataaaaaagtcttttaataaaatattaaattaaaaataaaaatgaaaactaaaaatattaaatttgcaaaacaaaacatcctttagatttaattgtgaaaattaaaaaataaaactgaattatctgccatgacaatatatatcacatgatcatattacataatttgacaataaataagctataacggcctaaaagtacttaatttcctgacccaatacatttattttgatttttaattgggtcatacacatcacttagcatttctatttttttattaagaaaatgaacttgatatatcccactgttttcagtttgagaatgggggctagtttgagaaacttcaaagagaaccaatacacatgcaatttggtaccaaagtggaattaatctttttctcctcaaatatcgtgttcatgttatcgatgcaaatggtcttatctataggtgtagttgtaggaaaaaattaatattagataattcaagaatattaagaatatgtttggaatagctaaaatcttaagaaaaaagaaaacttttggtaggtgtttattgtctcaactaatctttaattacttttatatatttaagttttgtaattttttttaaaaaatataatacttaattacttgacatttttattaattagaaattatgtgtttcaacactactgattttttttagatagtagatgattaatgaaaacaaggttgtaaatgtaactataattttggttgtaatcttaaaagttaataaaggtttcatatctatgtcccgatagcaattatgctcnnnnnnnnnnnnnnnnnnnnnnnnnnnnnnnnnnnnnnnnnnnnnnnnnnnnnnnnnnnnnnnnnnnnnnnnnnnnnnnnnnnnnnnnnnnnnnnnnnnnnnnnnnnnnnnnnnnnnnnnnnnnnnnnnnnnnnnnnnnnnnnnnnnnnnnnnnnnnnnnnnnnnnnnnnnnnnnnnnnnnnnnnnnnnnnnnnnnnnnnnnnnnnnnnnnnnnnnnnnnnnnnnnnnnnnnnnnnnnnnnnnnnnnnnnnnnnnnnnnnnnnnnnnnnnnnnnnnnnnnnnnnnnnnnnnnnnnnnnnnnnnnnnnnnnnnnnnnnnnnnnnnnnnnnnnnnnnnnnnnnnnnnnnnnnnnnnnnnnnnnnnnnnnnnnnnnnnnnnnnnnnnnnnnnnnnnnnnnnnnnnnnnnnnnnnnnnnnnnnnnnnnnnnnnnnnnnnnnnnnnnnnnnnnnnnnnnnnnnnnnnnnnnnnnnnnnnnnnnnnnnnnnnnnnnnnnnnnnnnnnnnnnnnnnnnnnnnnnnnnnnnnnnnnnnnnnnnnnnnnnnnnnnnnnnnnnnnnnnnnnnnnnnnnnnnnnnnnnnnnnnnnnnnnnnnnnnnnnnnnnnnnnnnnnnnnnnnnnnnnnnnnnnnnnnnnnnnnnnnnnnnnnnnnnnnnnnnnnnnnnnnnnnnnnnnnnnnnnnnnnnnnnnnnnnnnnnnnnnnnnnnnnnnnnnnnnnnnnnnnnnnnnnnnnnnnnnnnnnnnnnnnnnnnnnnnnnnnnnnnnnnnnnnnnnnnnnnnnnntataattgtttgtatcacttttgataaggtattgtaaaaataacaaatttatcttattatgattgaatttatatgtaaaattattttacattagaatataattaacttttttctcttaaactttagaaattgacatcacaaaccaccacaacttataggattgaaaatgtatgtttctagtttgtcttctaaatcaatattattgagcaaagcattacattatcttgctcaaatagacgattctaaaagtcaacatcataccatcattaaggattataagattgacttgataataaaagaaaaagaaaaagagagaaatcatgggttcaaattcctttactaacaaataacatttcctgataaannnnnnnnnncttcttaaaataaaagatatgagatagttttatttttataaagataaagagatatgaattattttaaatatttttttctctttgaaaaaaaactcaaattcatatctctttaacattataaatataagcatatactgaaagcaaaatacacaagaaaaaactagaaaagttcaaacctagttttagacctaaaaagtataaagggagtttgctctttagagttcgactcatcaaagagttgatagaagagattgatctttatactccaatagctcatattcatgtgttcatttgatttttttgtagtagtatattttaaacccaaatagatccctttttatttcgctatgtgtgttatgaacactaagttattctaaaagcgatttgatattaagagcttgtaaggacaatctagggatcttagtatcttgatcttgccaagtgtaatatcctcaaaattatattatgaattatatttatgatttaattatgaaggtatgatggtaattggatacaaaaagaatagtataaattttatttaaacataagttacgcaaacttgaatcaatcaaaaattcatgaaataatcctaagtctttcacgtacaacagccatgcaaatatgtttgcctacaatagccatgcaaatatgtttggctaagtgaatatttggtcaactaaagtcaaggtgaagtccataagttgtccaagattcttgaacattcttcttatgactatccatgtggcattacggggaacaaataaacgaaatcaagctttaagcagtcttccacgtgcacatgccattaatgaagggaatattggtaatgatgattaaataaggaaaatctagatattttctcctaactaagtttctttctaactaaatttttttctatcctaactaaatcaattagtataaatagattacaacatcacaaaattctgcatgtaaaacttaaacctctacgctcactttcacgttcattttccttccatttcacatcttgctttcataatcataatcactcttaaaatattctaaatatccattgtctcattttcttctctccaaatcattttaagacttttttcaagatctcaaaggaggacatctacctattcagtcaactacaaatccaactcacttgaggtagctaagcttcaatccttagttaggaattaatttggacctatttacatgcttaaatgtaagaattatgactattatttaggatggaatttcatgtcaattgaaggttatttaataatgtgaaaatgctgatttaaaccatatgataggtgataatttatagtttgaagtattagtaatgtttggaagtacatttgatgatctttggaggtgattttgatgatatttagattgtttttattattttgaactgcaacccggtcacagctcagacacaacttcgacacaaccattcaactataccaacccggacacaaccatttagctataccaacctggacaccgccatccaggctacaaccaacccggccatcccagctacaaacatcccgacaaaaaaaaatctgaaagatatattatggtatattagttagactactaatatgatttttatgtagcttgacgataatcaaatatcatgcctaagttggtatggttttatttgtataaggtatggtagcctaaccatatttttggtatatatgatgttatgatggaatttgatgtgatgatatgttgattcttgtttccaagtccagtacgagatttgtgaaacggtatttgatactacatacagcacaatatgtagtgaccaggtgcacatacaaggaataaatcatgcatatttgcataagacgatcgcaacatccaaggttgtcagaatcgtgattctacgtagaatcgtggaggcctcgtagaatcgaatcgtagaatcgtaagattctacttcagacaaaaaaaaagtaaattaccttacctatatataaatatgaaacataaattcataaaatgatacaaatacaatcataaaataaattcttaatccaaactccaaagtgcacaatcacatccaatcaaacataaagtaaaaatacaccaccaaacataagttcttaaaataaaccagttataaaacatagaaatggttcatatgtccattaattctctaataaaatcatctccaatgtcacccccatcacccccatcatcctcatctccatctccttcaagctcttcatcagttgagaagtgatcatgaacattatcatttaaaatcaaattgtcaatatcaaatgcatccaaagttggatcacttcctcctaccaagtcattgtttccactaccactttcatgtaaaggttcctcaagttgaacattgacattatcttcatcaaaaatatcatctccatttgtcgttatccactcatcatcagattccatatcttcaaatggaagagcaactgtttttcttagttgtctacttttgagcttcaaattatacatgacataaactaaatcattcatcttcttttgatgcaagtggtttctcctttttgtatgaacctataaataacatttaatatgaaagttgataacttgtctaaactaaataaaaacaaatataatttaaacataaataaactcatgaagttcaattaccatttcaaatgaactccaattacgctcacatccagaagcgctacaagttaagctcaaaacacgaatagcaaaccactttaattctggacatctatccccaaacatttcccaccattctgcaggtggcatagtcttcctagagtttattgcattctccatagaaaagagacctttagcaaaatgaaattcaagaagttgcccgttaattttattccttaccccaacatccttgaccaatctcatcatacaaatgaataatccttctttcacttctccattatcttttttaaagtcatcttcaaaatgcaactgaggattaaggtaatatgcagttgcatgcaaaggtctatataattggttctcccacctcttatcaataatttcccaaacaggttcataactacatagataaataaagtaaaccatatagttcaagattagacatagataaataaagataaatatattttaaaacttagatgatatagtttagaaaaacttactttttcttcacattattgaagttgtttttaatcctttcctttgcacgattcatctcaacatatatgaaacccatggcgggttgttgataagaatccaccaatcgaaggactaccataagaggggcagcaactttgaggcatatgtttatattcttccaaaatctattatccaaaaccgaatcttccacttttctcccatcttgtgaagtagcaaacttactttttttccaatcttcagaactgaacatcctcgtcaaagatgctttcatttcatggagacaagctagagtcaagtaagcagttgcaaatctagtcatgccaggtctaactaagtcactcccatttgtgtacttcttaagcatgttgatgagcattgttctaccatatatataagtgattatctttcgccccttctttatagtgacttcatgcaccttcaaatatttctccaagtcctcaagcatcagatcaatgcaatgggcagcacatggagtccaatacaaatgcgggcgagtgtgcatcaataattctcatgcagctttgaaatttgcagcattatcagtaatcacctgaacaacattctcttctccaacaaatgaaacaacatcatctaacatcttaaaaactttgtctgttgtttttgaaatgtcagaagtatctaatgaatacaagaatacggtcccttttggactattcaccaaaaagttacaaattgaacgcctttttttatctgtccacccatcagacattattgagcaaccagttctcttccactcatccctaaactcctgcattctagcatcagttttttgtactgcttgtctcaagagcttctctctaacatcatggtaggatggaggtttatagccaggtccatatttcccgatcatgtcacacatctttaaaaatgcgggattttttatagcattgaatggaatgacacttgtgtaaaaaaattcagcaacttgagcatcaactaaaggtttttctttttttttcatcatttggttcaaggttgcttgaacactaacactcccactactcgaactcccttcttttccttttgaaccaaaaccccttggtccctgaaagttggttgcctgacttgcctcaaccctaccagcactatcttcatattcatcttcatcaatactaatcaatctccttttcttttcttttgttgctttagattcagcaacaattttcatcatcaacattttaacctcatctggcaccgctgcacaaggctcagaatcttctctagtcccagcaagatgacgtttgaaacggaaaactccaccactcacaatctttgaacaatacttacatttcacttttttaccactcccatcaacatcaatcccatgtttccacccaatgtcagtcctattcccaggggcatttttgcttttttgtctaccaatcgaagagccacccgcatctccagcagtggaatcagatccacttccactcattttacacaacacaacaagccaacaagattacaagaagctgcaacaagctaaggaaattaagtaaaaaacagaaatgtgcaaaaaaacaacacaacaatgcaatcttttcactaggataaaagactttaattctgacattgacttgttcacaaacaacatcatattaatataacaaacaactacaacacagtgcatcaaacatcattgatttacacctaaatgaacacactagcccactaggatgaaagactttaagtctgacatttttgttcacaaaaagcatcatattcatataacaaatagctacaagcctacaatcactaatcagcagtttagcactcagcaattcagcagatcaaccataggtccatagcaaatttattcaaagttcaaaccaacgattagcaaaacatatcacagatacaaaattagatacctcatacccattatacaaacatattacagatcaaccaaaagtccacaacaaattgattcaaaccagccacacttcatttcgtgagtaatgagtaatgaccacacagccacactccattttgtgccttcacaaatgccaaatttaataaaacaaaaacggacagggagggagaaagggacgaacctatttgcttccaggaactcgagaacggcgtacgaacagagcagggacgcgcggaagggacgaagctatgagacggcggcaggacgtgacagtcgaacgacgaaaggtacgaacggtggaaggacgtcacggtggaagggatgaagcggcactgcacaaacaggaagcacgaacggccggcggaagggacgatcgtgaggaaaagaagaggaatgttgtgcttttggttttcagttttcactcaccacagaggattaggggaagccgggaaggaaaatgaaagccagtgaagccaaaacagcgccattttttgatcccctggactcgcagactcgggctggactcgcgattttgggtggaatcgtccaattccactgtagaatcgtccgagttttctcctaaaacgattttgtctccgatttaactcgccaggggatagcagactcgtagaatcgtcctattgagcgatttaaatcgcgattttgataactatggcaacatctacatccaatacgaggtgtagctacgtacaatatgatatgtaaaatcatgggcaccctggaaaaattcatttcatgcattcatatagttgcataattcttgtatggatttatttggttatattgaggatttactaacgtactaacgtgtttagtggtttagttttgcctactgagaaattttatttctcactaaatttctttcatatttttagatggcctcaatcattatattccttgatgcgctagatttggaatggtatcttgatgaagaaaggaactgttatgtcatcactatgcaccctattatacttgcatatattgattttgacattcattttccagtatatgtacttaatggactgtttaatcctaatgactcattcctacagttcgttcctgcctatccataaccacctatggaaccaattaacttggttagcaaaaaggagagatttggagagaacttctaaagtaaagatatgggttgtaggtgaaaataataagaatacccacaataaccaagaggggggtgaattggtttgatcttggtattttaaaattatttattggtttataaaatcagagttaaaggatcttcatcacttttaaaccaagaaaacttttaatcaatcaaatcattcagcttaagaaatcaatagttcaaaacagaacttgttgagtaatgataatgatgccaagaacaaatgaacaagataactaataaagatgaagaaatagaaaaacaacctaagaatttatactggttcacttctcaaaagaagctacatccagtatattctaatcaatactagattagagtttcactattataaatttcagttcttacaagctttacaacaaactctctttatcaacactagataaagaatagaaatctaaaaccctattagacttctaatgaacaagaaccagagaatactactctattcttccctagagaacactactctagcccaagctttaaagaacccttttataatagcatcaaataacataaattgtaaaaacgaaattacaatcaaagataatagagagaaacaacctgatgatccaatgaatatgaatgcatatgagttaccaatcaaagttgaattgcagaaaaagaatttcagaacatgctctccattgctctcttgaaatctcttgcccaagaaatcattcaatacccatgaagattaaagagtgggacaaaaacttagtaaaccaagaaaatcactttctaactctgagaaggcatgtgtatattcagaaaatttgaaatattcaagttgtgtttcaagccaagccttctttctttttataacaactttttgtaacaacctgcaatcgattacacgcaccacataatcgattaaaatgacttatgtaatcgattaaattgtcacttaattgattaaagtgttcaaggatcctttctaggtttcacaacgaacaaaataatcgattaactcgagctgtaatcgattaaaccagataagttttatttcagaatcagcttgtgtaatcgattacattttatggtaattgattaaagcagtgaaccaagctttttcaaatagcttatgtagtcgattacgaataatggtaatcgattaacacaacaatgcacaatattcattttacactatgtatcaattacaagaattgtgtaatcgattaatatattcatcaaagcttttccagttttaaacacgaaccaaataatcgattaatccgctgtgtaatcgattaaaacagtaaaattatattttttcaaaaacattactcaattaattcctttttcaaagtgtgagtagctttgacattttaatgaaaatatttaagcatgttaatgattatgtgcatgcaatgcaaggatcaaaagattgacctctcatacacttcatttgaactacaatttccaaggcatgtgaaaagctcaaacattcttctgattcataaacttcattcttcttgttgctccccctatatccaacagtaggtttttttatataaataataatcctatctagtgtggcagagatgtttcccggtagttaagttctatgatgttttcactactacaaaagtcatcttccacgacatgcaatccacgtcggttgtgagaaaaccgactttgaatgttgaccagtggcatttttgtaaatttttgaagagtactacaaaaacggcgtcggttctcagtgtgcccgtcgttgtttaacactatacaaagtcggttttgaaaagaaccgactttgattctttttaaaatttgaaaaacagattgatatcctctttgcgcgccccacccctttgtttactccctgttaatcttttgattttcttatggcagcatgggtcttgcgattatgacagagactcttccagaagcagagataaagaatgggaaaaagggagagacagggagagaaaaagagaaaagggaagggacagagaaagggagaaaagtagggatagggatagggattcggagagaagcagggacaaggacagagatagagagaagagtaaggacagggagagggaccgagatcgtgatggtggtgagaaggaaagggaatgtgacaggggctgccatcatagagatcgatacagggatcgtggtgagagaagggaaaggacaagggatagagatgacgatgatcatcacagaagtcgtgactttgacaggtaaaagtttgtttgggatcgtatctgagttggagcttgaggattttcatcagcatcagtttttcagtagatattcttattgcatgcaatgtattgtcttgcatctgaattcacttgtattcccaaaacttcagtggcatttttattcccaattaatttttcttcattcacattcatattctcttttcaattgttttctgatgttatttgatagtacagaagaagggattatgatagagaggataggcataggcgcaagtctcggtctcggtctcaatcccagtcagagggtcgatctgagcatagatcaaggtcacgttctcgttcacgcttaaagaggtaaattcttggaaagatccttaacatacagtatatagatgtctgcttaacatatcatgcatgtgactgccatttgggaattctgttttgttttataaaataaaatagttggtggatttgcaagtggaatggaactagtataatgttgtgaaagcatgtggaagaatgaaatagtttaaatagataaaaatacattttatttcagttcaggtacatccttaatccttaataatttaaatttgaggaaataattcaattagaataccttaatatggccaaatgatggggacctctatcattatttcaaatattatagacgacagggcacccctttatgttccttgatcatttcaaaacatcttgttttaagaattttattagatgtggttgtgttttactttaattatcaattgacacaagtgcttggcttgaaaagtagcatccattgttggaataactaatttaatttacttgcagcaaaaggacaagtggttttgatatggctccccctgcctctgctttgttggctggtgcttctgctgttgcaggtacatttactcatgtatatattatacaattttaatcttaactgctttttctctttgtttgtgctagtatggaaaattcatgtcgaattgcatggtgttaacttggtaagctttgttcagttattatatgaatatgtagcttttgagaactggtttcccatggtgtgtaattttgtctttctttttacttagtgatataattctggaactaaaagatgctttgttttttttttttcttgtgtttggtgtttgtttgttttgtttctatgtcttgtcatatgttctaagaaggcaatgttgggctactagccccactgtgctgacaatgggcgtgagccgacatctgtagcttttatgtccacggaggaatcaatgcacctgtttttggtagctgataatgttccaatttgacatatgatcagttcttgtgagggtacttatggaaagccggatatttcattttcatttctgtttggagatattgtaatgttttataatggcagggcatccctttgatcacgcacttgcataaatagaatagaatgcattgctacatgatcatctgataccttgtgatgttagtttctgattaattatgtcaaaaccaggttgaggaaagtagcctttggacgcatcttatgcaaatcaagcaagctttggggatgagcaagtaatcaatttagaaaatttaaacaagtacgagccacacctgccgccaagctaacaagtaataacgcatctctcgcggcttcagccatagtatccatcagtatctaatatctttcaggttctttacctttgtaaattttcaaataggtttttatttttattttttttcctccggttaaatatgctggaattgatattgttttattaccctttgtttttttcttcatcttatccccccaatactagaggctgtaggtttccactggtaattttgtatcaggcaaagaaaacggaaaagaaaagcaatgagcaaatatcatccaaatttaagttttgctattatcatatttatcaacagctttgtaattttatagcagaagtttgtcagcatggctgaggttatgttgtgttaaaaaaaagaggaattgacagcaaaagtttttttatttctgcaactgcttgatattcttctaaaagagagaaacctagttaaatacaaactaagctaaaaccataaaacacacgttgtccactaactagttgatatcttggtccacaaaatcagcaacaaatcaccataacagtaaaaataaagatgcagttaaacactcctaaaaataaggttgaccaagtaaaataaagcaaaagaaaaacaactaattaactcctagaaaataggacatcaaaaacagccttgatacatcaacagattatatattttatacaaacaggcttattgcaagtgaactgaataatattgtgtagaagtcccgagaaccataacattttttcaccctgacatttaaaatactaattaatatcttaacatagttattgtggttaatgaataaaaaattaagagtaatatttaatattatttagatcatgaacctatacgatggatagattaaatgtgtaagagtaattgtatatcaaataattttatatatattttgtttaaatttttatttaaaatataattagtttattatttaaatcttttcacacatataataattaaaattgtgaagaaaaatataaaatttgaaagacaggaaatattttataacaattgtttctttttttccagctatggttatttagtgtgatttgttattaatttcactttattcttgtttctttctttttaaagatgcaacagtttagtgctctccctgtcatgccagtgcaagctatgactcaacaggtaaatatgcttttcagtgagatgggatttagtgatttacatttaccttttttcccttttatcatatgactttcccttattatggcctgtctttgatatactgaatttccaggctacacgacatgctaggcgggtgtatgttggaggcctccctcctacagctaatgagcaggtaatatagaatattggaatttctaactggaaatagttgagttggtttggctatctgctacatatcctttttgccaattaatttagtcatttgatcaaagctagttagagtatcttactatcttaccactctttacttctgattcttttgatatttgagttgaggaaacaatgcaaagtgtcccagtcccactatatgcatgggttttttgttttaattcgaactttgccttcaaatctttcaaacatttaaaaaattaagaatcaattcgtttgtaacaatttgtttcaatttggcttttttatttaatctttttctgatcttattattctgcagtcagttgcaactttcttcagtcaagttatggctaagattggtggaaacactgctgcccaggtacataataaatttcaatgaattgtgtgccagtttgctgactttgaaatgtgacttattgatttagtttgctgactttgtaatgtgactaattgatttaactcacgcagtttcttctgatgagctcaaagatgatgaagactatgaagagattcttgatgatatgagacaggagtgctccaaatttggtaatttctgatttagtttgcttgtctcactgtgaagtgtgaactgatattaattttctgtgttatttgttttccagccaatttgtagtcccacattctcatagagaataagacctaacttacaaactgaagcctctataacctttttcctcacatgcttgttcgttgcatacctgaaaaatttatttgcatatgtcgctttctaagtcggttattttaaataaccgactttgtatatacgctttctaagtcggttatttaaaataactgactctatatcatcgctttctaagtcggttattttaaataaccgactttgtatctacactttctaagtcagttttttaaaataactgactttgtaagctaactttctaagtcggttttctaaaataaccgacttagaatacgcaattttttttaaaaaaaaatttcaaagtcgattttttaaaaaacaacgttgtaggcttgtgtatactacgacgtgaaaaataaggtcggttacaaaaccgactttgaatggtgaaaaaaaccgacttaaaaaggtaccgctgtagtagtgtttacgtgtgaggcacccaaaagaaaagagttatgtaacaatggacaatgactactttatatannnnnnnnnnatatatatatatatatataagtttagcaacttatatagcttctataagttatacgttttaaaaatttatgttaggatccgtttagtaaaaacaaaatagtaattatctaacgattctttaaaatttaacccaaataaaaatataatatccagaataattttaggttattacactaagcttagttatatggtttttattaagtcatgatagtgctttctacataatggagtgtgaagagactctcttgatttgttgtgttcattgctaactatttataattgtaatctcgtgtgtttgcatctatatgtgctttagtgcataggtaaaatgtttctcgagtgacaaaaagtattgggtcaaattggatagtgaacgattgagcttcataattggcaattacttaatgcaaccaactttttgcttctgcgtcccataattttattattcccacgggcgatcaagggaggaactaaactagcatgagtgcgaccagtcagtgaagtcctttgtttgagaaaagaatgagagcaagtcgctgaagtcactgcatcgcgagtcttgatacatagtatcttaagtcctttccataactcctaatttgattctccatcggcccatccaatctaattcacgactcagtcggtagacactacactagtagggtagtaagttatgtaattaggaatttgaaaaccaaaaagcccttcttggatcctaggagcaaggatttacagtcctttagaacaaccttttgattccaaactgaatccctttcttctctacctaacgatcgaactagttgatgggaggccttacctggtgaactgccttccttaccgctccctggggaaggatttgcttttgaatctagtttagttgaaagcgtaagcgaaactcagaactccatttctaggaaaatacctatataattccatatatctctttaaaatattccaatttgaaaaaaatggatatcttgtatttctgttaaataaattatcatttcaatcattttcagtctttgcctctggaaagcacccggatccatcatcctcgaaaacctccaaccaagtattaggataaacaaatttgattaacttaatgggtccatttttacgttacttcgcactatattgtacaattcctttatttgtgggatttatttctcacacgataattcattaaattatagaatggatttttacctatgcctagatttcggataaatgaaaattttattgataaaactttttcaattgtagccaatatcttatttccagaatgaaaagtatgctttctccttccacttctttgtgaactcagacaagatttcactcgagttcaagctttcgtcacttagtcagaagggatcacttgggcatgtaggaagaaaagctccactgctggtgacagctaccgagacattagactcagtaacagatcgaaagagattgctcaagatgagtgtctgggtaacaaagccgagaaaggtgtagtcaaggtgagagtttaacgagcgaggagagtgatttggcaaatagaagcggggctgttcactttcacttggtcgcctggtggtatctttgaaacctctttgcttgtggaggtaggagggttcaccaggttctaccactgcagcgctcaatcatgttagttaggctatatgcttaatccatgcaagtcgaaacatgattcgtcatcttggaaagaattccttcaaaattgggaacccacgggtttcctgctacctattgtactggaccttcgaccaggcattctactcgctcttcattcacatcgttttctcatgagttgggtgcttttcaatggttgttggttgttgggcactaacagggtacccaatggtcacatggaatattcttgtttattacaacttaataatatgaaaccttcttccttccaactccttcccacctcaactcatatgcaccctttgctgaagtgacttgcgaccccatttagccattatgtctccattgccccgacaataggtcttctggttcatcttctccttttccttttgccatgtgtctttattgtttatgtttgacttccatgaggcttccgtttgaggtttagaaaagtttcattaagattctattgacgtcttctttcctccatcgatggcaaggttactcttactatttatggtatgttttttttcctcggattacatattctgtaattcgtgttacataattacagattaggagatctgtaacaacttatatattgatcaattcttaatttattagataaattacaaaattattgatctgtaactcatctaatacaactatggattgatcaatttgtaatgtatatgttgttacatattgattaatttgtaactttattggatgaattatgaaatgactctttagtgtcaatgtaggttgcaagttaaagaacaagatgacaaaggctgcgagttaaccaaacaacacttattatagtggcttcaacaacgtaggttgtggaggtgtaagatggatctctaccattaacgtaggtgacactccaatggcccacggggtgcaatgtgcgaaaccaacagaaaggagaatagggtgctacgatggtaggaacacaaagattaggggtgtgacaacactgggaagatagggtgcgagagtaacaaagaagcaaaaatggaatgggggagaaaggggtgcgacgacactagaacaaggaaagttagaggtgttagggtttgtacagatggggtgggagtaagtggctaaacaaaattggggttcaggctaaaactagtaaagggtaaaaaaaaagtcaatccagatgctttactatttccaatggaccaagcaaaaaataagagttttaaataattgcttaagcaattcttaggtctaacacttgctatttagatccttacttactctttaaaaatttttattttcgattatactcttaattttattaaaatatagttttggaaagtaccttttagaatcgattcgataaaattaattcaaaaatatattttaataaaatgcatagtttcagaaattacttttcagaattttatatgttgttctaaaagttatttctggtaaacaaaattcgatacaaaatatcaaacgtaccttccttcaagagctgcgataatcattaattgttggaagcatacttttttatgctaaatattgagaggctgataacatgttcacgaaatttccaattggtggtgaaacgtgtagagacacaaaaaagtaccatatacattgtataatatatgaagtcaaccatggacctaccttgaaatatcattacggaggacaatgcacaacatcacgaataaatttggtggtagatgcaaataataatgaacatggatgacggtgatggtccaaaattaataataatgataaagtaaaaaataggataaaaattaacaaatatgtggggggggggggggggnnnnnnnnnnnnnnnnnnnnnnnnnnnnnnnnnnnnnnnnnnnnnnnnnnnnnnnnnnnnnnnnnnnnnnnnnnnnnnnnnnnnnnnnnnnnnnnnnnnnnnnnnnnnnnnnnnnnnnnnnnnnnnnnnnnnnnnnnnnnnnnnnnnnnnnnnnnnnnnnnnnnnnnnnnnnnnnnnnnnnnnnnnnnnnnnnnnnnnnnnnnnnnnnnnnnnnnnnnnnnnnnnnnnnnnnnnnnnnnnnnnnnnnnnnnnnnnnnnnnnnnnnnnnnnnnnnnnnnnnnnnnnnnnnnnnnnnnnnnnnnnnnnnnnnnnnnnnnnnnnnnnnnnnnnnnnnnnnnnnnnnnnnnnnnnnnnnnnnnnnnnnnnnnnnnnnnnnnnnnnnnnnnnnnnnnnnnnnnnnnnnnnnnnnnnnnnnnnnnnnnnnnnnnnnnnnnnnnnnnnnnnnnnnnnnnnnnnnnnnnnnnnnnnnnnnnnnnnnnnnnnnnnnnnnnnnnnnnnnnnnnnnnnnnnnnnnnnnnnnnnnnnnnnnnnnnnnnnnnnnnnnnnnnnnnnnnnnnnnnnnnnnnnnnnnnnnnnnnnnnnnnnnnnnnnnnnnnnnnnnnnnnnnnnnnnnnnnnnnnnnnnnnnnnnnnnnnnnnnnnnnnnnnnnnnnnnnnnnnnnnnnnnnnnnnnnnnnnnnnnnnnnnnnnnnnnnnnnnnnnnnnnnnnnnnnnnnnnnnnnnnnnnnnnnnnnnnnnnnnnnnnnnnnnnnnnnnnnnnnnnnnnnnnnnnnnnnnnnnnnnnnnnnnnnnnnnnnnnnnnnnnnnnnnnnnnnnnnnnnnnnnnnnngtatgattgataataaaaaaatataaacataaaaaaagggatgtaaaaatagggtatgattattaaaacataatttcggtatttactttctagaattgatatatgttctggaaattagtttatggaactattcattttgttaaaacataattccttaaattagttttttcaaattgatatatgtttatttggaaagaatttttcaaaatttatgttttaacaaatattccagactaaaactcttgatgttttagtttccttttttttttattattctaaagctcttcgtattttacaaattttaagtctctttaattattttcttccacatgtactctcattatggacatttaaaaatggtattttaaactaaataggtagtttttgtatagtattaaatattttttaagctgtgtgaactaaccttaaacatcaagagtttttgtccagaaagagtaaaagggtatacttggataaaaagtataaagagtaggtaggggtgtacttggcaaatatagtggtgcaaatagcaggtgtctccatagccgaaaggagtttaatacacactttataaaaggatgagaattctaaaattgattttggtaattctcattacattccaagaaaatctattccgaatataataaaaaacacgaccctttatgaaatggaagtaatgtttgtagttgaaattgtgttggttgttattttaaaacacgaggttactccttgtaaaaaaaaaaaaaaaacaacaacaactcgaggttactagatccctaaagaaccacatggcagagtctttttccatggccaaattaatggctgcatcattaatcatttcatgacgaccattatggttaacagtagctaaaatggaatcacaatttatcaccacaggtatagcacaaatggattaccaatacgtgttacattacacgtaagtaatattttttttcaaaataaaattaaaagtggttctttatcattataaagttgaataatcttttatgcttttagcctctcttttttgctggataagcttttagcctttaagcatccttcgacctccttaccaaccacgttacttataaaatggcgaaacaccattgaatgataaagtagcgttcaatttatgcaaaaataatatgatcaatattgatggaagagatcattaatatgataaggcagaagaaaaatgtatagaaaaggagataacgagactccactttctcacatgtgtcactcagttatattatataattatttctaggtggagtcattctcctagacaatcattgatatcccttcccttccaatgataaaagcatgtaaaataagctaatatcaacatattattaaaatttacttctatctaaattctaacctatataatccatatatatcaaatcattttgtaaaagtctaatgcatgtgaagggatatatcaaccaatcgtaaagaaaaaatgtttttatttttattgacgtgtgttttgaatttaattcaatcttataaatttaatttgtaaggtgacaatttcttacttatatactcaatcttaatattaactttaatcaatgtaaaattttaatatatcccatttttatccatgggtacttgtcacaacatgggacttcaacacatccctcttcacctaagaatgatcacaactaagttgattttctaacacactctgtcaggctcaaggcatcctagttggagcttgacaaacacaagaaacctactaataaatttaagataaactctaatatcatattacaacatggattttgaacctaacttaacttataaattgactaattattattttaaaataatttcattagttttattaattgaatgatttaggccacatcgtacccaggtcaccttaaacttgtaaaataaattgatcctaaaatttttaaaagtctaattaattaaaaaaaatatttaagtcagttaattaagtttaatagatggacctatttaataataataatgatgatgatgataacctgcaatattatactaaattataatttaatgctttaatattatatttttttggtttatctaaagctatgatatacctttttttatattttttttaaaaaaatcttttttcccataaagaacttttcggaacattaattttttagcactttcaaaacgtattttttgaaagtcttaaaattttaacattctataaagtactttttgaatgccaatttctagaagaaaataaatcctaaatcctaaagacaaaaaaaaatggggcacttggtgccttttaagttgttttgtgtgcgctatgcattgatatactcattttcttgatttccttaaaagaaaccctaacagaaaaatgaaattatgagattctggaagcatttgtaggaatataaatcctatagattcattgagactccaatcacaattatgtcaaatctttcaagtgaagtaatcactgaaatcatgtatcgtttgtcgatgaagtgactcatccgattaagaagtaaatttttcgtgatggcaagaagcacaagcaagcacctaggttctttgcaactacgacattaccatcatggactatccataactatgcaaaggttgcctcttaaaggaaattcagtctcattttttctccctaaaaattggttttcggaaagtattttcataatgttaaagttttaacacttatggaatgtatttctttcttcaaaatatgttaaattttcaacacttctgaaaaatactttttggagaattaaaattgttatacttcgagaaaatactttacaaaatgtcttaaatttttaacattcgtgtagtactttctaggaaaaaaggatattttttttgggtggggagagaagggagtacaaaagggaggcatattaataaaattgagatgtgtaaataacaactatgaaatggtcttagctatccacatcctctttagatagagtcaaagaactaatccaaggcccaatgtgttacacaaaattacccacatcatatatagtgattcaaatgaacaaaattaggaaattttgtcacttattcacacacctcatgttagaaattccaaaataatcaacaccaaaagaaactcacttgatatcaaaatgttcaagtccaatccatttagccctaatctatgtgggtctagaccagaacacctacataaaaaaatcataggaccaaaaagcccacaaattttgatgggccaggcctagtctattggccataacttttttgaaaattacttattattaaaaagtttgtttagcttcttctatgggttagctcactctatgaactaaaaggtcaaattctatttttgttataaataaatttgttaaattatgacaatttttattttaaaatgaatgaaattgacatcaaaccaataaaatttctagtgatagattcatctctaatttaaatacaaattttactagaaagttgactaacctatggtcatattattcatactctcctgttttatcttccactttctttctcttttttaaatttgttttttgttataaaaatacttttgattgaaataagtttccatttttttaaacttaacataatgaaattttgtttttgttctattctttttgtaaaaaaaaaaataacataacaaaaacaagttttttttttatttttttttgtatataaatggaaattagtttttgttgtatatttatacataatggaaactatttttttttgtcaaattgaaaagtaaaaaaaaaaatgaaagttgcaattaaaggggtgggagaagaagaaaaaagatagaggaatgtgcatctcatggggaaaaagagaaaaaggtaggagggaagataaaaaaaggttaaaaagagggtgagggtgtgaagaaaggggtaaaataagaaaacaaatgggcaagtgacaagtgaaaaaaaaaaaagaaggaaaggagtgagaataaaatgggtcaaataatagggtggttattagaaaggagagatggattgaccttaggactttgggatagttaacaactttactatatatgctataactaactcatgaacatacttaaaagacaattattactcacaagtaatcgagttgtattattttctcaaaaaaaaaacttttaaaaaaacaagtttttgttgttattttttgtatacaaacaaaaaatagttattgttgtatatttatacataatggaaactattttttgtcaaattggaagtaaaaaagaaagatagaaaaggaaagaaaaatttgcgactaaaggtatgagagaagaagaaaagaaatacaggaatgggtgtctcgtgaggaagaagagaatagggtaggagggaagacaaaaaggttaaaagatagggtaagagtgtgaaaaaaggggtagaataggaaataatgaaactgaggattgagaagtgacaaaagaaagggggtgagaataacatgggccaaataataaatagggttattagggggagacatgagttgaccttaagactgtgagataattaacaactttactatatatgttataactaactcgcaaatgtacttaaatgacaattattactcacgagtaatcgagtaaagattataaacaaaggattgttaattagtatcatcgaataaattcctttattctcatatattgttactctattgttacatgacgaaggctagcatgagaatttaaggaggtcattggaaaataccattatatcttaattgatggcagagatttattattattattattattattattattattattattattttcctgttttgtccctttcttctccctccgcatctttcatctttagcaccatacatcgtcagagatgatttctggcggtgtttcatttttttttatgacaaagttccattaatattgtttctttcaaagtttcatcccctaatccttctacaatatccacaaactacccaatcaaaaaaaaaatcctaaaattgttatttagaattaataccacaacaccaccaagattcaaatgaacgccatcacactaaagcgattacaagaaatcaacgcatctacaaaattttcctctcgtgatttgcattgcattcattaaatttcaacaaaaaaaaaattccccaaaagagatgctaagaacaacacaaacagtcaaaacaatagttttgtagtactgggatgccatgtcatcaacgacatctcattgaaaaaaatcacgtaagggttccatccttggacattgcatgtactgtctgcaggtttatcgtctgtgaatgcaatgaaactaacactttgaaggactccaattggggacacgtgcgagccacacaaaacgtgaatgagtaaatagaatcttttcggttagtgtttcctaaaagtatctttagtgctagatcttaagcaaagatcttgagctcaagatctgatcttcactagatctcccaataaagaaggtgaagagatttccaccatggagaatgaattcttatagaaaatccctcaagatctgcacattgttcaaaaagaataaattttttctttctttctctctccctaagatctcaaaatgagatctaccattaaagaaaaaattagagagatcttgagagatcttcaatcctaggtggtactgtagagtccaccaaaaagtggtctaagatcccaatttaagatctatcactaaagatactataattaatcttagtgtcattacctagcatcacttatctagtaaacattgagagagaaccacatctaaggatatcataacaatatcattttggaaacttcgcgaaaagggagagaaaaatcaaatatctccgccactaatttaaaaactgtaaaatctaacaatttagaaaatcttttccatggtaggagacttgaggagatcaatcttccaccctagcctccatcttgttatacatacttaaacattaaagtgtctttgctaatatgtatacctttgcctcttcaacatcatcgtcgtcgctctcttcaacttaaagtaaattcaacagcctacagacaaagaaggttcaaccagatcactaacatttttgctacgctatcctacatcaaattaactatgtatgaataagtcatgatatgttggttacttctaagaaagctagaagtgtaacgccccaatctattaatcagggtcattaccaaacacaatccacaatccacaatcaagcatataatcattcagagtttaagcagtttggaagcataaacatgagtgacatcatcaaatgtcatctgtataacactgtacactataatatggtgaatatacatataagtttctctgtacagtacaaaactatacaaaatcccatcagggtacatcaaaatacaaaaccaaaggctaaatacaaagcatcagagcacaagctcatgttctctagcctaaggtgtccatcagcagctaatcctgcataggtttcttgccttgggatctctctgctactctggaagaatcacctgcaaaacatagccccacacaaggggtgagatataaaatctcagtaaactcagggcccttgaaggtatttccttcccctgattcactgatcacacacacacacacacacacacacacacacacacacacacacatatatatatatatatcaaaaacaatcataatcatcatgtacaatatacctgaccacaatcaggctatacacatccatcagccaaaaccaaggcatactcatggcatacagccattcatcacatcaataactgtcatgcagaggctacatcatagtatataggaacatctcctcacagggaggctacctctatatactagtcacatctcctgcatgtatccctaacggaggcttcctctgaatatatagttacatctctatctcgagacttcgtctacatatcaggtacatcccctttttggtgagactacctctgtgtacataggtacatctcttatcacgaggctacctctatgtatcacaggaccatctcatcctctaacacaatacaattgcctggggaggctacctctgtgtatatgggaacatctccacgtaggaggctacctccatatcacaggctcatctctcaccaggtcttactcaatctcaaatcatctatcctacgacaataggatgctattcaagcacaacatgcatattaattccctatcacagggttcagttcacatttcaggcatatcagatcaatacatctcaatctccctctcatagggatcagaacatcagtacacaacatctatatacatgcatactcaagtgtcataatcaataaggcatgctatcagtgaatcatagccatatatatcaatttccctttcagggatcaaatgcacatcaattccctttctcagggtcaaacatatcaattccctttctcagggtcaaacacatcaattactcatggccatgcataataattacccatctctgggttcagatcaaatatcaagcatcaactaccctttcatagggttcagacaacatctaccattcattcacaacattatacacgttcctctattagcctaaacacatatcataaccataatcccagtggatatatggtggaacgcagcagaggatacacaaacaaggaccaagagcttacctgctctagacagatcaccggctctcctggcctcgtggtcaacaccaccagagctctcacgttcacgtcctacacaagaacaagcatatagcatatcagatacggttctagaccgttcaagtgaaaggaaactctcatcctttctacaaacatgaaccaactcactatacaagtgatcatctgatcctcaacaggatctctctcagcctacacaaggctacagagcctccacaaagattctgatcgagctatcatcaagcatatacctgcttaaaatagctcaaactcaacttctcattatcaccagtttcaaccggtcaatctcatctatatagtctcatgagcaactttgttaactgctctaaggtccagactagtcaaatagtcaacctttcatctctgctcatactgactcagagccaaaatcaaacttcatcagtaatgatgattcaaggctctaacctcctcagaacagtcctctgagcataagattctacagagtccgagcctaacaacggctctaacacctccaaaaacacccctcaagataaccccaaaaccccgaaatccaatacacagaaccaacggttagagctcgagtttcttacctctgtgatgttcagaaacaccagggaatcgctttccctgaggtagatcgctcatacaaagcttccttcacctttaaactccgagctctcaagggttctcccagagaaatcaaatctcactgtttctcagctattctcagggatcaatcgggggttttctctcctctcggggttctaatcactttctcagttaggtcagaggtgtttagatgaaagatggagaagatacgaagctctcaaactcatcaatggaggtttgggacgaaggagaaagaaaaatgccaagattttcgagcttctgggccttttataggtctctgccgtgactcccacgcctccaacgtggcttcccacgccccaagcgtggcgttccagacaaaattccacttctgggcaatttcccacgcctccaacatggcttcccacgccccaagcgtggcttcccagataaaattcaatttctgggccacttctcacgcctcaggcgtggctcacaacaaaacccaaaaataagctttaaacataccttttaagcttcctttctcaggaactctaatccataagcttagagactaatctcaaggcttaaaccaggcttaacctgtgttaattacatgcttaaaattcaagatattacaagaagatgaaaataattaataaagattgatttgttttaaactaatctaacagtttagctaaacatttttgaatctataacattaatgacatgtaagcatgcgtggatccttcgtgatacatccctttcacgaaaactaaaaaaaaaaacgagttagagtgagagagaaatgacacatacgtttaatttttgtcaatatgtttataaagaattgcattaatgtagctaaacaaattgaatctaatttgtcaaggaatccaacattgaagtctacaagaacgagtccttcatgatatgcttcatgaaattgttggcgcacaattcatgattgaattgactttgtaaaaacctgaattctacatgcaaaaaaagtaatgtttattttgttaactagattgagtaattcgaatcttataatttgtaaaggtatctatatatatgcaacattaacaataatgtgttcttcatgatatgttccataacatcgtacgttctaagcagcagccactggcgaataatttatgattgagttgcatttgtcaaactcaattgcgcaaacttctctattttgttaagtacgtacgtagtatgtatataccaagcgaatgaaattatttttcgtatgtcctactcgtaattaacggaatcacaaggaagtttcgtgtttataagtatcaaagacgaagtttcacccacgattaattacaatatgtatagagtgcacgtagtggtaagcaaattacgtttttggggtacaataatattttgagtcttgaagaattcactcaatagatagatagttttgttttgcttttttgaaaatcaattagtacgtacctcttattaatttattgagttttcacctataagtttttgattttttttaatataacttaaccaataaaaaaagtgttgctaacactcttgaatagctgaattggccaatataaatgagaactctaacggtttatctatttatttatttagtcatttactgtaacaagaagtctcggggccggtttgtttgaaaaagaataattcaatttttcctaaaatattttcatcgtcgtccatttccttttatttgtttacttttgaagataacacaaagattgaaaatgtaattaatatccttatttttatgaaaatcatttttaatttcataatatgatcgatcttagcttcactatattatttctttatcatatataataagtatgtaaaatatttaaaattacataaaaaagagagagtaattaatgttattcaaaatataattaaaagatgcagtaaaaaattaattagaagatggtaattaatgaattaaaaatatannnnnnnnnnnnnnnnnnnnnnnnnnnnnnnnnnnnnnnnnnnnnnnnnnnnnnnnnnnnnnnctataataaataaataacaaaagatacttatcctactatctataaaaaattgttaaacatttagttatacttttaagataattgcattcattttttatttaatactcttttatagcatatttaagatgataattctttaacatactagcatgttgaaagcatcccgaacatgatttatttctgaaatgtcataaacattaactattttttctttaaatcatttaatgaaaataatttctcggacataaattttacattaaatatgagtagcattatttaatatatgattaagaattattttttacaccaatatttgtttaggaacaccaagatttttttaaaaaaaattatttaaacacaatatgattctaagatagntatttaaacacaatatgattctaagatagtaagatagaatactaatgcttctcttagatgttttttagatgatttaaataaagttaaatattttataccttggtatttttttgacaacgaaaagcaactcttttaaaatattaaaaatattacttaaaaaatgatattttatcagtaatatatttgttgaaatttctactttaaattttatatgataagatatcccaaaataaaaaaggtaaaaagtaaatgtaggttcacaacggataagttaaaacaacgtagaaagatataacacaacaagaaagcagagtaatggtttttatattcctagacaacgcggacactccaaattccaatccatgattattttcttttaaatatatatacaaggaaactatttatataacaacattctaggaagatctttcttgcagcaaacatataatggatatggacaaaggtataaaaagaaaatatttattttgggtcgttttatgggtatttttaggtcccaggtaactcaatcaggagttaattccattcaagatattatgattatcattagtttgaaagatttttatactataaatataaaacacgaattttatattaaatatatcattctcacaaaaatgagattgcatgatatctaaccaataagtcaattcgccagaaaatatataaactaagtattatatatgaaaagaggttttcaaatttaaatttatgattaatgaatcactaaaatacaatttactgttatatgagaactaaaaacataaagaaaaggagagattagattccgtccaaaggccaataccaaaaataactattttttgcggcttcaacacaccccactatcacatgccattcatattcttttatgcattgcttctttcttctccccattcacactttgccaactaaattcccattcccattcccatcattagctggttctataaccttcttcccaattaatactcctccactctctttatattctcctcaaaagtctcactcttttttctcacttcgattccataattaaaccttcttttgtttctttctctctttcactctcaagtctcaaaccatggcgttcagaggaggcactatgttgatattagcaatgatggcattacttgagattcagatatgctcatcggagataaaccgtggaaactttccaaatggcttcgtatttggcactgcctcttcagcttttcaggttggtgccactcatcttttaactaccattagtttattatattttttcaacttcagtttcatgccacaaaagacaaaaaatactttttttattatataaactgtttattaattttattgataattaatttttgttgaaaaatcttaattattaaattcttggtttttgtgattatatattttttatgtaaacgtgttttctctttttatgattattttgttttggtttgtttttctatttgatagaagaaaaaaaagaagaaaaagagtaaagaaaacttgtcatgtctttactcttttgcatttgagaggggtgaggtttagccttataagatgcttttcttccgctacgtgaacgagcggttaccgcaaatgaatgaggagagataagaacgaaaaaggacatagcatagtgaatgagagcgaacaaaatttgcctcgtttgacatgaattaattaattggcctttttcctcttttacttttgacattaattgttaatgtatcaaagtgacacaacataggttagtcgcattagaaaaagtgtgcaatatatgatgtgttttgataaataaagaaagaaggaaagaaacaggtaaaagataaaggggatggaaataaagaatagataaataaagtgaataaaagtagatgagaataaagtatttactgtgtgacgggttataaaggtttatttggtgttaaaggaagaattgagggaaaagagattgtgagtttgactttttttcacttgtgaaaatactaataattaatattgaacgataaaaaaatatgtttattgtaatagaaataaaaaagaaattgattattgaattttttaaacaaacactcaattatcttttagaaaaggagataaggtggattggatgattaagagagaagaaaaaagagaaaaaattgtgaatttgatttctcttattaacaaaatcaatctttgtttgaaataatatattgtcatggttaatttattgtcttgtgtaaaatgttgattacaatcaattatcaattaatattataataacatttagggtaatgttatgtgtgtagatcacaactcatgtttacttataattatggatgataagatagacttaaattctaaattctatgagtacctgtacaaatattcacaaatgggaaggataattattcatttattggggctgggatgggggcaggtatttagccataattttttgtggagatgaatgctggtacgagtacagatactatagtacctatttcgtcttgtcctgcacatatatgtcatatatattaaaatacgttacttaagtgaataattgaacaatagttagttaaagttacacgatcgagtttaaaaaaacattattcaattagaagttattgaaccgtgtaatagtaaataagagggatcaaattacacttgtgtaactttgaccaactaatataccatttcataacttgatatagaatgcaatttgtattaatccaattattaaattatatctacatattatcaagattatttgtgtgaaattttgtcaaaattgaacaataacaaaaagataatcaaacaatccatattttagtatattttgaaaattttatattacgtcaatttaatctgtatgaatgttgtagcaactaattttggattaataagaaattttgtatatatgatctaagggaaatgaactttcaatccaatgatttggtttaagaaaacattattcagttgaaagttattgaattgtttaatagttgatcaaagttatgctagtgtaatttgatctctcatctaattgatattatacatatactcttctataaaaaaattatattttcctaattttttgacaaacagtaacaatttaacatatagtagtgaatttgattcacattctatgtttnnnnnnnnnnnnnnnnnnnnnnnnnnnnnnnnnnnnnnnnnnnnnnnnnnnnnnnnnnnnnnnnnnnnnnnnnnnnnnnnnnnnnnnnnnnnnnnnnnnnnnnnnnnnnnnnnnnnnnnnnnnnnnnnnnnnnnnnnnnnnnnnnnnnnnnnnnnnnnnnnnnnnnnnnnnnnnnnnnnnnnnnnnnnnnnnnnnnnnnnnnnnnnnnnnnnnnnnnnnnnnnnnnnnnnnnnnnnnnnnnnnnnnnnnnnnnnnnnnnnnnnnnnnnnnnnnnnnnnnnnnnnnnnnnnnnnnnnnnnnnnnnnnnnnnnnnnnnnnnnnnnnnnnnnnnnnnnnnnnnnnnnnnnnnnnnnnnnnnnnnnnnnnnnnnnnnnnnnnnnnnnnnnnnnnnnnnnnnnnnnnnnnnnnnnnnnnnnnnnnnnnnnnnnnnnnnnnnnnnnnnnnnnnnnnnnnnnnnnnnnnnnnnnnnnnnnnnnnnnnnnnnnnnnnnnnnnnnnnnnnnnnnnnnnnnnnnnnnnnnnnnnnnnnnnnnnnnnnnnnnnnnnnnnnnnnnnnnnnnnnnnnnnnnnnnnnnnnnnnnnnnnnnnnnnnnnnnnnnnnnnnnnnnnnnnnnnnnnnnnnnnnnnnnnnnnnnnnnnnnnnnnnnnnnnnnnnnnnnnnnnnnnnnnnnnnnnnnnnnnnnnnnnnnnnnnnnnnnnnnnnnnnnnnnnnnnnnnnnnnnnnnnnnnnnnnnnnnnnnnnnnnnnnnnnnnnnnnnnnnnnnnnnnnnnnnnnnnnnnnnnnnnnnnnnnnnnnnnnnnnnnnnnnnnnnnnnnnnnnnnnnnnnnnnnnnnnnnnnnnnnnnnnnnnnnnnnnnnnnnnnnnnnnnnnnnnnnnnnnnnnnnnnnnnnnnnnnnnnnnnnnnnnnnnnnnnnnnnnnnnnnnnnnnnnnnnnnnnnnnnnnnnnnnnnnnnnnnnnnnnnnnnnnnnnnnnnnnnnnnnnnnnnnnnnnnnnnnnnnnnnnnnnnnnnnnnnnnnnnnnnnnnnnnnnnnnnnnnnnnnnnnnnnnnnnnnnnnnnnnnnnnnnnnnnnnnnnnnnnnnnnnnnnnnnnnnnnnnnnnnnnnnnnnnnnnnnnnnnnnnnnnnnnnnnnnnnnnnnnnnnnnnnnnnnnnnnnnnnnnnnnnnnnnnnnnnnnnnnnnnnnnnnnnnnnnnnnnnnnnnnnnnnnnnnnnnnnnnnnnnnnnnnnnnnnnnnnnnnnnnnnnnnnnnnnnnnnnnnnnnnnnnnnnnnnnnnnnnnnnnnnnnnnnnnnnnnnnnnnnnnnnnnnnngtaagagtgaaaatgatgtaatattggtcacacaaaattacataacatacatttaacacattactatactacgtcaaaatttggtccgtacagtaaaagcgtatggttttttatacagtaaatctgttagaaagccgaattcaatgtagtgattgagatgcattttatgtaacttgtgagactcataaatagtttaatttaccaaatattatacaaataggtgacgatccaaacttaattaaagaggatcttacctaacaatgtgttcctagaattaatcctagaattattctggtatgatatatatccagtgaccgaaaagaaattcaatgcccaagctcctgcgttgactttgagtttgggtttatttcaatatatatatatatatatatatataatatttttgcatttcattctattttgttgacaannnnnnnnnnnnnnnnnnnnnnnnnnnnnnnnnnnnnnnnnnnnnnnnnnnnnnnnnnnnnnnnnnnnnnnnnnnnnnnnnnnnnnnnnnnnnnnnnnnnnnnnnnnnnnnnnnnnnnnnnnnnnnnnnnnnnnnnnnnnnnnnnnnnnnnnnnnnaaatagcgctttaatttaagccagaaaaattctcatactcaaagaacacttataaattacttatatgtatctcattacaaaaagatgggtgactatgaaatttgaatgaaatatctataagttgtactaactaatgtttatcaaaaaaattgattaaattatttttagtgagatctcttttttaaattatgtatttttcgatcataatgcttgaacttaaaattgagtctaatttcactcataacaagaatttaatttgttgatatcaaatattaataccatggtttagacacatgtagctaaaaaaaaactgtagataaatttgatatgtgctcgtggcacagcgatcctatgcaaaaccagataactgcaaaaagatgtggttccaaaatagtatgcctcatttatttatttatttggattctataaatatcttttatggcggtatatatattattagttccttgtactttttaggtatactttttaaaatagttattataaaaattaataaatttacatatatgcatgataatttcttattaaataacagtataaaatatttaaacaaagagtgtattcaaattaaattctaaaacatcacctttattttcttcttctttgtatttcttacattttatttttcaccatcatcgagtgcttctcttgtttttatgcgtgttctgtaatgaatcattattaatgtgttattttaacggtatctttatttttttcttctaaaactgttattaaattatattcatatttgtcttgtttgaacaactgatataatgactcaatgattcatcacccaaaaaaaatgatacaataattgacaactatttaaatgatgtttttgacttctagtatgaaggggcagtgaaagaagacggaaggggaccctctgtgtgggacactttttcacatacttttggtaagaatcaataaataaatttagagttttatgtttatatattgatattattatttaattatgaattattgtttaaattattttaaaataattatttaaaagtcaataattttattatatataacaaattgtaattgtatgacatattatcctttgtctcttaaggttatttgccataatcaacattttagtccaattattcattctgtcacctagcctataaataagttggcgggggattgttataatttaattatgagctttgactttgagtttgacattttagaaaatttggatgagaaattttatcattcataaatggtcgtatttaacttaatctaagttatttggatgtctaatgtagtatccggtactctttagataaaataaaaaaaaatattcattcttaataatttgttaaagttatgctcaattcatgtaaaaaagaagaagtgtactcaattattgatttttgattggctttcctgttttgcacttaattgtttcaattgaagttacataaataattgagatgttgatgtctagtactacattttacttaaagcaattctttgattgcnnnnnnnnnnnnnnnnnnnnnnnnnnnnnnnnnnnnnnnnnnnnnnnnnnnnnnnnnnnnnnnnnnnnnnnnnnnnnnnnnnnnnnnnnnnnnnnnnnnnnnnnnnnnnnnnnnnnnnnnnnnnnnnnnnnnnnnnnnnnnnnnnnnnnnnnnnnnnnnnnnnnnnnnnnnnnnnnnnnnnnnnnnnnnnnnnnnnnnnnnnnnnnnaataataaattatcatacaaacttaatgttttgatctttcatttatttctataaacattatgtaagtattttaattcaaaaaaatagctgtcctttcttttcttttcttccaaaacatcaatcttaaatatacagtaccttcaaaaaaaaccatcgataataactataagatatattctactggtttacgtaaaagtaatcatcaaatttaatgtttcatcaatcactgaggattttttttctctttaaaataaggactttaatgcaaaaacattaattttttcttatgatgctgcaacttgaaagtaataagtttcttcatttttcttctgatcccatattttggtcatcatttattgtcctcggtagcttggtagtttcattcttatttcttatttttacatcatagaaccagcctaaaaccttaatttcatattctttagcttaattacggtctccaattaatcaaaatgagaattagaaaccttctaacggggatagaattactaattaaagtggagagtgattttgctataaagtggtatatgttctaacaaggatatataaggtgggttaaatagttaaggaaaaacaaaacaggagaaaggtcataaattcgatnnnnnnnnnnnnnnnnnnnnnnnnnnnnnnnnnnnnnnnnnnnnnnnnnnnnnnnnnnnnnnnnnnnnnnnnnnnnnnnnnnnnnnnnnnnnnnnnnnnnnnaaaaaaaaaaaaaaaaaactcatttccttacatttctattgcaggcaaaataattgatttcagcaatgctgatgttgcggtggatcagtaccaccgatacgaagtaagtaacaattggtacagttaaaaattttggaacctgttttttcatctgcaaaaattatgtttctaaatcagttaaatacttttgcaatctataagagttaaaaagagatctaaaacatgtgtaagagttacaaagagatctatcatgatattggtccaattatgattctaaaacagttaaatacttctgcaaggtataagtttcctatgaagcttattggcttaaaacaattaattaacattcttctaatgtgatgactcactttatagaaacaaatttggcctatttcatagtagatacaattcaaccacctttaaccctaggtcaaaagttgtgcaatttttttttttaaattgcatattgtttttccatgcaggaagatatacaactgatgaaggacatgggaatggatgcctatagattttccatttcttggtctcggatttttcccagtaagcattttcatactgtttatcaaaataggcaattgatttaatgttatttactaccattgtcttataacacaattttgtagttaacaaatgttaatagtgttgtggattgttgttgtaaaatttaggaagtacactatgttatagcctcattctttggataacaaacaaaaaggattgttgcacgccaagttccaaaagaacattaacacttttgtgtgactgttgaatgattttaacacttgttttttttagctactttgaaagtttctgtttaagtatgcataacttgaaaaaaattgatctgaatcactaaaatttcacttgatagatggatatggccaaatcaatcaggcaggagttgatcattataataaactcattaacgcgttactagccaaaggtaactctcattatccttgtgcaattgttacatttctgtaatttagttgtgaatatataataaaagttgcaatccatcaacacatgttgtctacatcttgagagttctgcgttgtagtaacatttctgatttcttgatccctacatttgtaggaattgaaccatatgtgactctctatcactgggacctgcctcaagccttggaaaacaagtacaatggatggctaaacgcttcgatcatgtacaaaatatagctcttcattttaaatatgattttacattactcttaaaattttggtaacaagaaaatatgcttctagttatgtgattcttgtgctacagaaaggactttgcaacttatgctgagacatgctttcagaaatttggggatagggtgaagcattggatcacattcaatgagccacatacatttgccacccaaggatatgatgttggtctacaagcgcctggtcgatgctccattctccttcacctgttttgtagggcagggaactctgctactgaaccttacattgttgcacacaatgtcctactctctcatgcaacagtagcagatatttataggaaaaaatataaggtaaaaaaagtagttttattttggtagtagtaatcttgttaagaaagcaatataatgatgattcagatatagataattgttcagtgtatcattggtattagagattttaacaattcataattcttttaagagcttatgcaagtgttgatgtgctccttgtgaaattatttacatcacattaaaaagcctaaatattgataactttggttattcctcagaaaatacagggaggatcactaggggtagcttttgatgtcatttggtatgagccactaacaaataccaaagaagacattgatgcagctcaaagagctcaagattttcagctgggctggtaagtcattcacatttttatttttattttgctgaaagtgaggggctaagtcattcacgtagtacctcagagatttgaatttacatatttttgtatctaagggcataaatgaaaggctgaataagcataagaaaaggataattgttcacattggaagttctatataggagttgtataaaacactcaccttttgtttaaggcctacaatgtgtccctaccatcaaaatgaaaaaaaacaaggtcataactagaattaaattgttatatgtcataatgacaggtttcttgatcctttgatgtttggggattatccaagctcaatgaggactagagtaggaagcaggctaccgaaattttcacaatcagaagctgctcttgttaagggttcattagattttgttggaatcaatcattacaccacattttatgcacaagacaattctactaacttaattggaaccctgctccatgattccattgcagactctggtgccgttactcttcgtaagttttggaccaaatattaccaagctatagcattcatttgtaattttgcctttttgttctgccactaagttattgtttttccttttctttgctttcagcattcaatggtactaaagctatttccgaaagggtaagtcatatatgactcttttttttttttttgtgtcattgagatattgtaatgacgattgcttgagaaacagaccataatcatattgaattttgcttctggaagctactaagtagagcatacaaaagcttgtcattataattcggtgtttgctatcaaaacttgtgacataagaatgagtcttgtccttagttatctcgtattgtccttcttgtacttaattttcattttccattataatcaactctcttttaaccataataagtacttagagcataaatggcgattggatttttatttttttggttaattctataacttgtaaattctgacatgcaggcaagttctatatggttgtatattgtgccacaaagcatgagaagcttaatgatctatatcaaacaaaagtatggaaaccctcctgtctatattacagaaaatggtaatcttcaaattcttatattctaccaaatctctagagtgaattttggcattaaaatatttaagtataacataaattacaaatttgattcctttaaagtagctagtccactttagagaggaaaggaaggaattccaataattgataagaaaattaatggttgttattacctgcacgtgcataataaattatagatttgttaaaatctacttccttaattttctcatctaacagttgagatttctttcttttctctttaaagtgaattattcaaaggagtaaaatccattaattacttttttgacaggaaaaaatccattaattacttagttgatactaggtgtttgataaaatgatgcattatagtatttttacaggctaggtatcatgatatggtttcatattacatactagaaccttaaaatcttctctcttggtctctctataatccttgacatcatagtttttttttttgtgtatttccatattctataatttacaattcaatctattttccatttttttccagcacttttagttggaaaacagtagaataaaatgccaacaaaaagtaaaaattgtaagctaaatcttctttctcatgtctatcacagggatggatgatccaaatagtctatttatctccattaaggatgctctaaaggatgaaaaacggattagataccacactggctatttatcttacttgctggcttctatcaagtatgtaatagttgttcttacttgtattgtattattgttttgggaaatttctaacaccatttttttaagagtttaatgtttatgtactaatgtataacagttttacattgcatccaatctcgaatcattatttgaattattttaacataattattcgaaaagtcaagaaagttaccatacgaataacctttttctcttttttaagtcaataaactaatgaagtgctgatttggttgattgcagagatggttgcaatgtgaaaggttattttgtgtggtcactattggataactgggagtggtcagctggatacacttctagatttggtctatattttgtagactacaaagacaaccagaagagataccccaaacaatcagtggaatggttcaagaacttcttgaaacctactaaataactatgaaaaatatgtgcaagattgtatttggaatcatataaattgtatttgattagatttgaattggattatatgattcaaaaaattaatttacattttagaaacttattgtaataaaaattaagatttgaaattgatttgtgaatcaacttttacagttggaacaccttgtcacttgtaatcgaatgagttattttattttactaaacttttttcgaattaagaaaagtagtgtgcgtagataaataaaggtaaaattattaattcaagtgtttaaaacaaaacttaaattaaatgcacttaaatataactaactttgactggatttattagacatagatatgatttttgtccttctaagattattttgttttgttttgacccatcttttttaaaatttaggaattagcgtcctccaataaaaaattatggaggaccgtatttaagcaatcttaatatctaaaacattaaaaaagaagaaaaaaaatattctaagatcttgtaatttattctttgattttcagactttcatattgaactttaaaaaatgaagtttgaagtcttcaatggtgtttgaaaatgcaaacattagatacatcctttaaacactattggaggaagttacaattttctcctataaacaggggggttgagaacggttgatggatctatccaataaataagatcatatccaatagatgaatagaatcataagagcaacaacacaaaagaaaacacttcatgtggcatgtgaaagcaccatcctaaagaacttatctataaatactacgcaagcccttgagaaaacaataaaaacttcttgaataggaccacaacaacataactatatcaaggctgaaaataatcacaacccaagaatgaaaggggaagaacaagaagcaacatnnnnnnnnnnnnnnnnnnnatatatatatatatatatatatatatatatatatatatatatatatatgaaatgttaataaaaaataatgttaattaaaaacagtaacaatgtaaatttttaagataagataaaacaacaattaaaacgttaataaaatatccatatttaaaaacgatgacagataatcccatatttttcaaaactaatcaattttaaaaaggtttaattattctgtggtccttgaaattttgtcaaatttttaattagatccttaaattattttattcaattaggttcctaaacttgtatgtatttttttaattaagtctttaaatttgtattattttttaaattaggttcctgcattaaggacctaattaaaaaaatactatttcaaggacctaactgaagaggaaaaaattcaaagacctaattaaaattagtgaaatacttcagggtctgtagattgatttaacttttaaaaaaacattaacataatataaagatttctagataattaagctttgaatcagaatttaaattcaaaacataaacttaatttattaaatcacaatataaaaatattgtgaggcccatcatcacacgcaaaaggggtaaataggcgaaggtagttactttttccactttccctcattacttatacactctcatttcccatcattattttaatttctttccctaaactacccccatacatacactccccacatcttctacctcccgtactctcttggaaaaaacacaccttccccttccttaactctctttcgaaaataaaaagaaaaatactcccctctcatttatatttagcctaggatcctccttcttccaccaagcaattgtcattgtcctgatcctcttctcctatgcttgaaatcattcacatggttgttttcaaaattagtcattcgatgtttaagaataaattaaagtagttgaattatgaatgtgtacaaaacaacccacaatatttgtatttgagtttgattgttttacgactaagaccattgtattggcgagaccttggtgcaagtaaattgtaaaaattggtgacatcattttgttgaccaatgtgtgtaaaaaaaatttttctctaaatttctttattttcaatcattaaataaataagaatatttttttttacttggtacttttattggtgaaagactataaaaacaaattatttaaatggacgagtgttagattagactaattaaataatggggctggtgttaaattaatcgtggtttttttttttttaacttctcgtcggtttgcaaaaccgcagcccaatgtttgttggttgtgcatgtttcttttttgtgtattgttattttcaccttttttttttttaaatctattttcacacccatttatttatttaaatgcctnnnnnnnnnnnnnnnnnnnnnnnnnnnnnnnnnnnnnnnnnttttttttttttttttatctcctttcacaccacttaactctatcattatctcgtgcaccccccctcccattctctcccacaagtggtcattcttgtgttgtgttcgtcgttagacgacgaaaacacatttgttgtgtacataacacaataatttgtcattcttgtgtttgtgttatataacgcaatgtaaacatgttttcatttgtttttaataatgttcatttaattattttatccattttttttagatcacataagaagttacttaatgtgtaagaaacaaaatgtcgagtgtctgccgagtgtcctattgagagaatgtacatttatcatttatcattttgaataaagtaatctccttgcacaagatcatgttgtgggtgcacacacttggagctaccataagtcatagctatgtgttttcattacttgagtaatattccaagagggagggaagataggtgtcttaccacccaaacccaaaccgtgcccaaggtctcattcttaaagttgatgatttggagcagccatgaaaatccactttgttattagcttttttttttctttttttcttttttatgtgtgcccgttaatcctctagtttatcaaaagaaaaagatcttaattattccaaaatttgattaaaaataagtaaagtctaataaaaaattatttttactaagattaaatttaaataatatccgaataattaattttaactttaacatattaattactaatatccaattatttgatttactttcatatttgatattagctgatatctcacgagtcaattttcttcgtttgcaatatgtaattttctgttgtttttttgctttgttctctttcactaccacaacaatctttaactcacgtgacactttaaagtgtcggcatattatgttctttattgtgtttgatgcacaatccatattgctcaacatatatacaattttctacccaaatagattgaataaaaactcgtccactctctcgtccatattaaatttataaaataattttttatcaataaatattaattattataatttattataagaggaatagtgttttaaccagatgtaaaccgaaaattaaaaactaaaaataatgaaagacggaacaaaacgatttattttattgaattagatcgaattttagacctaattttggaaatcagtacaatctaatttaaattaaatgtatacatgcttgtattattctgttttaaaattatcatagcaatttttattttttgattttacaattatccaaattatattttattattttaatttatttataatgttaatggttttgcattaaaaatgaaatttcttctttcacctaattttattttatattatatagttgttatgttttatttttaaaattgaataaaaaatatgcaataagatttatttaatgccttctaataaaaacaaaaactaaaaactgattcaatttaaatttaaaactacaccgacttaattaattaaaaatcaatagagccaaatcttcctacagtcgatctatatcatctagtttaattcacaaactacttagtgtaagatacttaaaataataaaaaaaaactatttaatgtgcttttattcacgaaatacctgggtgagttacgtgtaactctacatcataaatacttaaatagatccaatgcacatgctgcttcatgatttatttatccctccttctttgttcccccacaaactaacaaaaaactctgttctttctcttcacctccactatcttcttctttttcatctattagacaaaggtaatttattacatctctctattttactgtctttgccttcttgcctttggttttgtcatttgggtacgtaggagctttatgttttggtgtgaattgtccttgctagatctgttattttattgtgttagatattcagattcttcaatttgtctcgtgtcatgtgtttgcatgttggtagaaaatatcagaaacacaagatgacccagcaaaacaattgaataatttaagttccattaattacattgcaccacttgcacttaattcttttatgatagaatgttcactggatctatttcatttataattgttccgattgaaaattatagatctctaaaattctctcaccaaacgtgcacatatgtaatttacaattgtcagaatcattctattgagtcgttaatgtcaaatattagtctaacacacacacaagcacacatcatagctatatctctatttcatatctttaatttattcaacaattcaatgtaagaagtatcaggcaagtttgaacaagtgttggggtgtgttcgtgtcagaaacgtgtctgacatggagacactttgagccaaagaggtgtcggtgcttcatagtttatactattgttgtgttatttgattttgatttgatcttcctataggccatagggtgctgagagagaacaaaaaaaatggtgaagatttgttgtattggagctgggtatgttggaggaccaaccatggctgtgattgcattgaagtgtcctaagagtgttgtggtaactgtggtggacatatcttcgcagcgaatcaacgcgtggaacagcgatcaccttccgatctacgagccgggcctcgatgaagtggtgaagcagtgtagggggaagaatctgttcttcagcactgaagtggaaaaacatgtttcagaggctgatattgtttttgtctcagtgaacaccccaacaaaaacccatggtcttggggctggcaaagcagcagatttgacctactgggagagtgctgcaaggatgattgctgatgtctcaaaatcagacaaaattgtggttgagaaatccactgtccctgtaaagacagcagaggcaattgagagaatcttgactcacaacaacaaaggcatcaatttcacaattctttcaaatccagagtttcttgctgagggcacagcaattgaagacctattcaaaccagatagggttctaattgggggtagggagaccccacaagggcaaaaggcaatacaaactctcaaagaagtgtatgctaattgggttcctgaagagagaatcctttgcaccaatttgtggtctgctgaactttcaaagcttgcagccaatgcctttctggcacagagaatctcttctgtgaatgccatgtcagcactctgtgaagctactggtgctgatgtgtcacaggttatttttatttttatttttttatcggcaattattagttgttagtttttgttagagcatctccaaggtgggatacttaaatgaattgtttaaagttgagcaatgtttcttaacaatttttttattagaattgatgatttgccagggcagtgtttaagtgagttgtttaattgattattataaaaaaagcccaattttttgaatccgaaatttaatgtgactcaagttaagtgcttactttaacaactttagcattgaagtacacatttttgtataaagttcttaaatctgtatgacattaattgtaggattcacaaatttaagacaaagaattcatttaagtaatcatacatggtagatgctcttggtggagagattcgaacccatgatttctgctttcccttctcttcactagtaaatcaaccttataacctcatcttatgtgtcacaggtgtcgcactcaattgggacagactcaagggttggaccaaagttcctgaatgccagtgttggctttggtggctcctgctttcagaaggacataatgaacttggtgtacatttgtgagtgcaatggccttcctgaggttgcaaattattggaagcaagttgtaaaagtgaatgactaccagaaaacaagatttgtgaacagggtggtgtcatcaatgttcaacacaatttcaacaaaaaaaattgcaatgcttggctttgctttcaagaaggacactggggacactagggagactccagcaattgatgtgtgcaaggggctgttgggagacaaggccaagttgagcatatatgaccctcaagtcactgaagaccaaatcataaaggatctttcgataaggaagtttgataaggatcaccctcaacatcttcagccaccaagccctacttcagtaaagcaagtgtctgtggtttgggatgcttatgaggcagttaaggatgcacatggtgtttgcattctcactgagtgggatgagttcaagaagcttgattacaagaaagtttatgacaacatgcagaagccagcatttatatttgatggaaggaatgttgtggatgttaagaaggtaagggaaattgggttcattgtgtatgccatcggcaagccactagatccatggctcaaggacatgccttcagttgtggcttaattaaaggttaaaaaaacacttgcttaagaccatgtcattctattcttattcttttaattgcatttctcttcttgcgctttttctatttgattagttttgtttcacaagatcctatggcactgtagtgtccattcttgtcttttatagttagctgaaaattctaatttgttgacttgcctttatgtaatataaactaagcatgggaccttggctattgcactggttaatgacatatggttgttttattgtttatataaaaaaaacatattttaaaatgtcgagaaacaaaataaatatttacttttaatacgatgatgttaatcttcagggaaaaaaataaattattatagaagttaaataatttattatcattcaaggtaataatacactgtggttattaagatatttataattcgttgacatctctaaccttataattaatttggttcacaaagctaattaatgaatggatgagtagacaaggatcaattatcttccttgaattaaacattcttgtcattttgaatctaagatgcaagatcaaattagcaagaacaactttgaaaaacatacaatgcataagtctaccgccaattataaattatcaatttctctatgtttattttagatctatttgatatataacacttgagtggaagttcataatttgacaaagaaaatgctatatataacaaaattaatattgtacctatagtaggtaatttttttctagacaacttcattttgaagtattcttttttagtgtgtgatacctataaaaatattttaatgttcaagttaggattcgatgttaagtaataaatgagaatcaataatatctatctagaaaatttcacccttatttatnnnnnnnnnnagacaacttcattttgaggtattcttttttgagtgtgtgatacctacaaaaatattttaatgttcaagttaggactcgatgttaagtaataaatgagaatcaataatatctatctagaaaatttcacccttatttatacataggcctcaaagtgaagtatccatttgtattagatgattaattgggtatagagaaataaagaattatactcttatttattgtgttcaaaacatttaataaaagctacatagtgaaaatggttgctataagcttgaaattgaataaccgattatctcataggctaggtgacaactatactatgttagatgttaatcaatgcctataatattataaaataatattattttcaatttagtgagagtttataggatcacacacatgaacnnnnnnnnnnnnnnnnnnnnnnnnnnnnnnnnnnnnnnnnnnnnnnnnnnnnnnnnnnnnnnnnnnnnnnnnnnnnnnnnnnnnnnnnnnnnnnnnnnnnnnnnnnnnnnnnnnnnnnnnnnnnnnnnnnnnnnnnnnnnnnnnnnnnnnnnnnnnnnnnnnnnnnnnnnnnnnnnnnnnnnnnnnnnnnnnnnnnnnnnnnnnnnnnnnnnnnnnnnnnnnnnnnnnnnnnnnnnnnnnnnnnnnnnnnnnnnnnnnnnnnnnnnnnnnnnntggataagagacaaatataaaattgtgtaaaattatttttatatattgttattataataatagttaaggttaattaatgtaaatttatataaaactagttgttgtgttgttattattgcaacagttaaggtgatgattaatttaaaattgtataaaactagtcgtgtgtgtttgttgttattatgtcataattaagtttattatcatttaaaataaaaacttgtctccttcaaaaaataaaataaaaaatagtttcaattttacttataaaaacaggaagtattttttcaaaaatatttttatttagtagaaattagacatttaaataattataaaggaagaataaaaatccagcccctccttcaataggtttttggatttattcattgtcacacatataaagtaatcaatgggagctgatgattaaattaaatgtaatttattttatttcataattaattaataaaaatatgatttattaattaacaacatatttaattaaatgcgacgcaatcctagcgtgtttgtgcgtaattttgaccctgggtgatcaaagacaaccataagttgaaaagcacactacataggtatattaattaatgcatgattcatgagatgaagtttgttttgcttcttcaaagtttgtaaaaattatagacagtcaaatcttattatattaatttactattcctgtaatacttttatgattttctatcaagtttttttaaccacgatcctttcttatatcaagttagttttttctttaaaacaaaacaaaggtgtgaataataataataataataataataataataataataataataataataatgtgatatgtaaagataaagataaacaaatattactatataaattatcgtatttattattatattatatatgaatataatataatataatatattataatataatgcttgtagaatccatgtgaataagataaaaacaatttttaaaaataatttcgtgtcttaccttttaaatttattttttttccaaaaagaaaaaggggtgccattggagtttttttttttaatattgggccgcttttgcgtatcggttattcgaggcccaacccaagagagtatttcaacccgacattcataccggaccatgttgtattgaaaagcacgaaccgtacatttttcttcttcgcgttcttcgttcgatccttcttcttcctttcgatcctcgatttccttttaattattgatcctaattctttaatcgagtacctgtctcgttcaattctcgttttcatcttccgtttgatcccaaaatcgttgcctttttgtaaccttcgtcgcgttctagggttagggtttcgattccgtctttctgggtcgtaagatctttgtttattgttgtgttttccccaaaactcctggttttggttcttattcgcttgatatttcgtcccaatttgtcgtaatttgttatcgcgtttacgattctagggtttcgttctggtcatatttagggctttttgatctttgaatttctggaggggttttctgtaaattatttgagggatttgattccttcccatacctgacgaaattctagcggtggtattgtctttaatttattgatttctagggtgagtcaataatctagggttagggtttgaaatacaatttgatattgttctaattagtgaaattacattgggggtacgctctttggtgtcgaggaacaacctttgttgtataattctatatccatttctcttcaattaggccttttgattttcgtttgtccctaaattgttccgaagtgctgtgtttggcgggttgtctgaagtttgaaatttgaaagaattgacaaggtgaggatgattttgtgtaattcctgctttatcgtcgttttgttatgtttttgggtttaaaacgctattgtttacaattaattcctttctgatatgctccactgcctttaatgtggtagtgagattttcactgtaatgctatatgcatatgatactctgtcctgcaaatttgatatgacatggctggcagctctgccttcttttgttactttaatcataacatttgtaggaatgtctttagacttgagataaaatttgtgctgaagtttgaagaaacataatactgatgttaaatgctatgaatgtgtgactagtggtttgcatcaaatattttacagtaaagtacttcaaatttactagagggttatccattgtaaaaaaaattgaaaaaagagggatgttaatatgtttattgagcttggtatatctagcagcaagtagcagttatgggaattttagctccttcaaattgatattagcttttttagtttgtttctttcaaaactgaaacagtgccttttcttttatggtgaacatatttgtagagtgttagtgttccatttttcacaaattttttgttaacaattctatccctctttccatgcaaacatacatagtctgagcacaaagacaaacactcccctaagagtacaaagtcatttgtgcatcaaatgcctttatttatgtagttattttttttaatacctacccttaattattgcataacagaatcagaatggggaataagagatgccacgaggctaatgaatttgaggatctttctttgaacaaggcaaaacgttttgaatgcaacaatgagctggtttcattagctgatattgttatgcccaaaaaggcctttgctaagactgttattaaaggtaaatgattttcttataatatattttaatttgttgagatatttgttaaacatactttttttgtcattggtgattgaaaattttgtgtgataattgatatatactaaataatattcttttcattttgtacataggtgaagaagatggcttttacaacattcaatggtatgatccacttgaaacagatgttgccaaggaatctccatatactggtgacaagaatggtaaacccagtggccacttccgcagctgttctagtgaggatgatactggttctggggcgacatcattatcatctgcttcctcaggttgttttgaatttgaaactccgcagaaagcatttgttcctttggatgatgactatttggcctttgattgctcacctagaaaatcagttcccattggacaaaatcatcaagccaccattcctgtttggaggggaaaagtgaataagatgttggagttaggcatagataatcatgacagtccctcttctggcttagtatcagctcatactgttgatgaagatgaagagagactgatggggacttctgtgctctcaatagatgagtttagctttcattattttagtaatgagattggacaaggcaggacaaagtgtaactgtatggatcgttgctccatcagatgtgttagacagcatgttagggaagcgcgtgaaaattttatggagactcttggggaggaaaaatttgttaacttgggcttttgtgacatgggagaggatgtttcacggcaatggactgaggaagaagaagacatgtttcatgaggttgtctacagcaatcctgcatcattgggtagaaacttttggaagcatttgtctgacactttctcttctcgaaccaataaagaaattgtcagctactattttaatgtttttattctgcggaggagggctgctcagaacagatccagatttttggatattgatagtgatgatgatgaatgtcaaacaagaaactctaggatttttggttttgaaaattctgatgattctgccattgagtctcttggtgatgaaaatgtccgtgtggaaaaccatgataattattctgatgaagatgatgatgatgataacagtgatgatggaactgaagataatgttcatggtgtaactggatgtgatattggaaacaccactactgagatagagggtgagattgatcaaagtccatcaaattcaaaggtgaactcacagattgagccttggaggaattccgatgagcatgtcaatggaactgcagggatcctgaactacaatattgctgttggggatgactcctgtatgtccttcgaatgtgatgccaatatgcatgtgtcttgccattctcatggtttaggagatgctagttctgctttgcaagctagggaatataaatgtgatcagagtccacagacgcagggaaaacttgatttgtccagcaatgagatggatcatgtttatttgatggagccctgtgtttctaaagattggtatcctgggtactcaacatgtccaacgccaagtacagatttagacttcttacctacctctaatttgattgaagagttttttggctatggtactctggataaaaaagacctgaagtgactgaagtattaactcatgaagtttttttggcatcagcatgacagattgaaggtacttgagggtgccaatcaaggtcttagaaagttccagtcatggacgtgttatttgagtaccaggaagggagctacttagtagtggtggaaggttaggagtaatccaaggtttgaatggaaagccttctattctttatttctttattttttttttcttttttgccagaaaggagagggtgagggactgagggtagaggtacatttgatgttaatttgtatattcttcgtgttgacttcaccgtttccaaaaaaaaaaaaaaaaaaatattgggttctcaccgttgctgttgttcattttaccacctcacaatttgtatgatataattgtaaaaacttggaccaacatacaaaaccgatggatttgccttctaagtctctgcatctgtccttatcttcagtggtttttattaatttatcatcataattaaggattgtcttttatagcatctaatttccttgaatcttgactttatcatgtgtgctttaaatttgtttctcaaatcaatttacactcttaactttctttcagtggatctttcctttgcagcataagatttaaaaatactcactaattttacttcaattgtagaattcaacttcagtttttaacttaattttattttaattgtttatgtttaatgtgttttgtcactaacaacaattgatacactattctttaatcaagttatgtcaacaaagattaattattatatttagtgaaaattatttaatatcaatatcatggtctgaaaaaaataatgttttgcctttggaaaaagtttttaactaatttttagtgggtttcattttatctcttcagtcacaattaacttgaattttgttttaatattttagttgtagttgtttatgaaagcaatttctataaaaaaattataaaaatttattttattgaacgatacatacaaaatcattattaggtgattataattgggttcaagatcataaattgaaaattataactatatattatatagatattaatcgaaatcatatatagagaaatatgatacattttcggccctttggaccctttttgtataaaaaaaataggataaattctagaattaaaattttgtattgataacatttcttttgtatgcaattagaaattggtaataactttttctgtcttttatttttttttttttcaggcattcccacaaaactcttcattggttccttattttcaaggtctatcttaaatgttactaaaataaatcaacctttgatgggatcaagaagaagtacttctcaagggacaccataagtgaagatccaagtaccacaatgacatttgaaagccttaacttaacatcaaagaactttggggattttcatcaacacattgttcacttcattggcatactcatggtccatttatttaagttcatatgtttaaaatcgactgcaccactttcaaggaccacttttggatatgatggctgaattggcataacatttcaacgaagaatgctcgagaacaaaagaaggttcacttgaccctcatgacacccatgatcactcaacgtagtaaagtcaaattcataattgaaatatttcctcattttctattcgtttgaaatgacgtttattcattttcataatattcaatctatcatatgttttgtattaattatttttaaattaaaaataaacttcattaagagaagaaaaaaatattaaccaatcattaaaataaaaagaaatgttaatgacaatgatagttttgaaaaagttataaattcaaaataaatttattgttatacattaaattaattatcttttttaatattaacaaattaaataattgagtcttgaaatataaattaacctttttacggtcaactataaatttaaaacaatgctaaccatttttctatattaaccnnnnnnnnnngcaataaaaaaattcttttttgattaaaaaacatgctttttaaagagagaaattattttaccacttgactaaacttataaggatggttgggtggtaaacaaagaagagagaaaaagattatggatttaattatactataaacaaaaattaataattaataactaatatttattagtaaaaagtaaactatttcaccaatcatgtgaaaaagagattatgttaataaaaactaaacatagaattaattaaaataaaatatctaatattaattattctgaatcttttgtgtaatattttttttaacgannnnnnnnnnaaccaactaatatttgacataaaaaaatctataaatataatgaaaataacgtaaaaagtgagtccaatgaacaataaaaaaatgacattagagtttttagttttatattttttgtgagactcactattcatctaatttttatcttttttttttgtttttcttaaacattaattgatttttataattttcaggtacatgtaatgagacaaatttcacattttaaataaataaataaaatttaaaattatgcttaaaaattgaaaataataaattcttttaaaagactaacaagaccaacatgtcattaactaaaaaagtaatcaaaccatnnnnnnnnnngcaataaaaaaattcttttttgattaaaaaacatgctttttaaagagagaaattattttaccacttgactaaacttataaggatggttgggtggtaaacaaagaagagagaaaaagattatggatttaattatactataaacaaaaattaataattaataactaatatttattagtaaaaagtaaactatttcaccaatcatgtgaaaaagagattatgttaataaaaactaaacatagaattaattaaaataaaatatctaatattaattattctgaatcttttgtgtaatattttttttaacgagcatattaaaaatgatttcaacttatgtaaaaattctgctcttcagatgtaagaggataaggaaaacaagttaaagttaagatcaaatatttataaataaaataaaattttacccaaattacaggaaaataaattgataaaatgaaaatttatcaaaaaatttatacaaaaataaataaatatttttataattaataatgtacttcttacttttttatttgaacaaataagaagatagaaaaaaaatacttttttctcttaaattaaatagtaccacataaaaagaaacttttttcttcattttattttttatttattatctctacctaccaaaaaaggagtgtagccgtatcaatcatctcacttaaaatgttgctataattcttagacgtaaatccaagcaagatgcaccattgttcatttaatttgctactcggctgaaataataccgtcttacttggactatagtgtgcatagtgcagaatttaactatcatgattgactattacttattttaacaattaagttgaaaatctgtttccccacccaactgcaaatcttcaactgttatacacactacttacaacaacggtcagcacaagtacaagccctaaagtgtatgtatgatgtatcttaattatattattcaagatttaattcatgatgttgaatatggattagaccaaattaagaagaaaatattagctttatataggttcatgattctcataaagatgaatcaacttgtttctgacaaaataaatacttcgtattaatacgattcctggattgtgttaactgttagataagttagacagtgattattaagtctcatattttttcaattattattatatactctatatagttcataataattattgtttcttacgttaattattagccgtaaatttagttttagtatcattttttaagaatttaatttaactgtaaattcaattaaattaactatcatgattgactacaacttattcgtgtaaaatagtattgtgattattgcaatgccaaaattaattgagaaaatctaaagctatacctataaaattgcaatcgattgaatacaattaattttatttgtttccagttttgtaaaatcattatgcaatcaaaagctattttaatgtggctataaaatcaaaagcttattttttttttgtttactttgaaaagttattttatttaaatattatattttgtagtgatagaaaatgtaaaataaaaattatgaatttgattttaaaaaataaagaaaaaagtttaaaaaaattgattcaatcttaataaatttgttaatatttttaaaagagatacaaaaattagttcaatcaatgaaaaaaatgataaataaattacatctaaataatattgaatatactgatattcctacaaagtttgtaaaattagaatattaatataaaaataataatttatattatatttctataaaaaaaatgtctaaggtcgcaaattttttagacacgaccgtgccatcaagatacgagtgtatcattcacccaataacaaaagcgtggtggaagtcattgctcaataataacctcagaaagcaacacggttttgccgacactcaaagcaaacagtaccacaccacatgtgttaatgctcaaaacagataagaacataagcaagacccacatatcttgcaccacacaaatttcacatatatttctttcacaaaacctctcccatctcacttgtcattgtataaatatttatttaaggcaacttaatcacatcctcatatttgaaaaggtaaatttttttttcaatgtacagtatcatgtccagcatccgcaaataaaatatttatttatgataaaaaagaaagtggttaaagcgtttatattataataacttaattcctcaccagctaccatatcaccttcagcatttgactaaagcttcagagatctgatactgtttgcaaaactagagaagaaatggccttagctatggtgggagaggcacttatctctgcttctgtggagatcttgctggataggataacttctacagagtttcgcgatttctttgccaacagaaacctcaaagtttctctcttggatgagctgaagataaagctgttggcactcaatgctgtgctcaatgatgctgaggagaaacagatcactaattcagcagtgaaggcatggcttgatgagttgaaagatgctgttttagacgctgaggatttgttggacgaaatcaacacagattctctgaggtgcaaggtggagggagaatttaaaacctttactagccaggtgtggtcatcactttcttctccctttaatcaattctataggagcatgaattccaagcttgaagcaatatctgcaaggctagaacattttatgaaacaaaaagatattcttggtttgcaaagtgtttctaggagagtctcctacaaaacagttacagattcattggttgaatctgttgttgttgcaagggaggatgacaaagagaagctactgagcatgcttctctctgatgaagatgagaagaataataacatagaagtgctaacaatattggccatgggtggtctaggaaaaacaaccttagctcaatgcctttataatgatagtgcagtgcagaaacattttgatttgaccacatgggcatgggtatctgatgtttttgatgtgtttagggtgacaaagacaattgttgaatctgtcacttctaaaaattgtaatagtactaattttgatgctcttcgtgttgagttgaagaacagcttgaaagataaaaagtttttgcttgtgctcgatgacctttggaacgaaacctataatgattggcatcacctaatagcacctttttgcggtggaaaaaagggaagtaagattattgtgacaactcgacaacagaaagttgcacaaatgacacatacatatcctgtttatgagttgaaacatctaacagatgacaattgttggtgtatacttgctgaacatgcatttggcgatgaaggttacgatgaatatccaatcctagaagaaattggtaggaaaattgcaaaaaaatgcaatggcctacctttagctgctaaaacattgggaggtcttttgcgatcaaatgttgatgcaaaagaatggaataggattctgaacagcaacttatgggcacatgaagaggtgttaccagctttacacataagttatcttcatctcccagcacatttgaaaagatgtttttcttattgctcaatttttcctagacaacatttgttggataggaaggaattgattctgttatggatggctgaaggctttcttccacaaatccacggagagaaagcaatggaatcagcaggtgaggactacttcaatgaattgttatctagatctttaattgaaaaagacaaaaatgtgggaaaagaacagtttcgaatgcatgaccttatttacgatttagccagactagtatctggtaagagatcttgttactttgaaggaggagaagtcccaataaatgttcgccatctgacatatcatcgaagaaatcttgatgtctctaaaagatttgagggcttatatggactaaagtttttgcgcagctttttaccactctttaaatatggacctgacagttatgggcatgtaaccaaaaaggtgtcacatgattggttgccaaaactaaaatatttgcgaacattgtccttgcttggctatggaaatatcattgagttgcctaattcaataagcaatttggtgcttttgaggtatctcaacctttcctatacttccatcaaaaggttgcctgatgcaacctttaggctttacaatttgcagactttgaaattatcacattgtaattatcttacagagttgactgtacagataggagttttgttacttttacgacatcttgacctttcctatacttctatcaatcagctgcctgaacagataggaaatttggtcaatctacgccaccttgatattagaggcacaaatttgacggagatgccagcacaaataagcaagctacaagatctccgtgtgttgacttcttttgttgtaggcagagaagatggagtaaatatcagagaattaagaaagtttccttacttgcaaggtatgctttctattttggggctacaaaatgttgttgatcccaagcatgcttttcaagctgacttaaacaagaaagagcatgttgaggagcttacgctagagtggggcagtgaggcacaagattcacaacttgagaaagatgtacttcagaacctgcaaccatcgacaaatttaaagaaactcagcataagatactacagtggcacaagctttcctaaatggttgggtgactcttcatactcttatgttatattcctttccattactaattgcaactattgcttttcacttccaccatttggacaactaccttctctcaaggagcttgtgataaaaaggatgaaaatggtgaagacagttggtgaagaattctactgtgacaatgggggctccctttcatttcaaccatttccattgttggagagtatccagttcgaagagatgtcagagtgggaagagtggctaccatttgaaggtgaaggcagcaagtttccttttccttgccttaagcgtttgattttatcaaaatgccccaagttgagaggaaacttgcccaaccatctaccttcgttgacagaggttcgtatatcagagtgcaaccggctagaggcaaaatcacatgatctacattggaacacatcaattgaagaaataacgattagagaagcaggagaagacttgttgtccttgcttgacaacttttcttacaggaatctacggattgaaaaatgtgacagcttgtcatctttgccaagaatgatcctagctgccaattgtctccaaagattgagtcttagggatatccccaatttgatttccttcccagccgatggcttgccaacgtcattgcaatcacttagcattttcgactgtgagaacttagaatttctgtctcccgaatcatgccacaaatacacatcacttgaatctctgtcaatttacagtagctgccagtccctggcgtccttaccattagatggtttctcttccctacgaggtcttacaatctgggaatgtcccaacatggaagcaattactactcaaggtggaacgaatgctctcaaattaacttttcttgatgttaagtattgtaagaaacttaggtcacttccagaacagattgatctccctgcccttctatacatacagcttcgtgggcttccagagctaatatcattgcccccaaggtgtttgccttccagtttacaagtactcgaagttgaagttggaatgctatcatcaatgtctaaacacgagttaggtttcctattccaacgcctcacttctctgtctagtcttgagattagtggttctggggaggaagatgttgttaacaccctgttgaaggagtgcttactgcccacttcgctgcaatatctgtacctagtgaattttgatgatttaaagttgttggaaggaaaagggctccaacacctcacttccctcacagagctatccatcaggtattgtaaaagcctcgagtccttgcccgtagatcagcttccatcctctctcgaattactgcagatacgtggttgtcctttactagaagcaaggtatcaaagtcggaaagggaaacactggtctaagattgctcacattcctgcgatcgagataaatgatgaagtgataatatgacctgtggcatgagtaggaagtaggaaccatccagaaggtaaaagaaggcttcaattattatgagaaagtatagtgtggtcattatatttttatttctacttcatgatttcaaattttaactgtggtcctttgcgtcatggggtttaattttatttcacatttaaataagctaacacgggtttaattgaatgaatagtactgaagaataatttattaaattttgtgaattcttaagagttggccaagagttttatttttttaaggattgtccaagagttggactctaaagtcacattttaatcttgggggaatatgttgtgtggttcctatttctataagttggagattaaaaagagacaatttttctgaaaaatagggactacaaattacatattttaaaaatggagggaataaaattagatgagttattttttaaatactaaacataaacatgtctatatttttatatttaattttttataatttttgaaagtttcaaagatttatttttcaacttggaacatgtttaaataattaaactttctatttatatgaaggttgatactttatattgtattaaagttatgtggtttcttaatttagattgttgttggtatagtggagtataataacctttttacattttgtttaaatttgttttcatttgttaaaacgatacattttagtatgtttgattagatattatcttttcttgattttatttctgacttagtgtttatggcatatattagttcttttgtgtttattagtagatacggagtggtgtaattgatgtgatggattattgaggcaaattaatgtcaaggaagtaaaatgatggacaattcttatgtgttgaattaatacagtgctgcataattcttattaataatattgatttggaaatgttgttacagatggttgctgaggtgctgggcatgcaatatttggtcaccatttcaatcaagttgtcacttttctttcttcaccagtgggatggtttctattgaatgatctgaacccaacactagaaatttcctctatttgtaattggtacaaataaacctattgtatgtagtttgttgatttttttttttttgattttatgtttttgacaagcaaaagatattttattgttgtggtttgttgatgttaatgttctattatctggtttttcgggagtgaaactatctttgtaaaaccataatgtattggattatatttattatggtgggggaccatccaagtttatgcacatcagtagtaattggattttgtattggatcactggatgatgattaatatttgatacctatttttctttgtattaaattgtaagttaaccatgttcatttgtccttatattcttcaagttgaataattattttaaaatgttctgattatagcgcaagcttgtaagcgaatgaagtaataaattaagtgtgtgtatatatatacttacgggcattgttatcaaatccaatatgttatcaaatccaatatggactggccagtcggattgggacccggtgatctaattgggttagttccagttttggatcggttaagcagttgatccggtcaaatttggccagatcgatcaccggatcttggttggaccggtccgatctgatcgggttttttttttaatttggattttggagtgtgaatgttagttataaacttatatataatagatatataattttaaattcttaatatagtgggttaaatcaggctaattattggcctactgggtggaccactggcccactatctcgatttccagttttggaccggttaagcagttgaccctgtcaaatttggccagatcgatcacaggatcttggttggaccggtccgatctgatcgggtttttttttttaatttggattttggagtatgaatgttagttataaacttatatataatagatatataattttaaattcttaatatagtgggtcaaatcaggctaattattggcctactgggtggaccactggcccactatctcgatcgggtgaatgactagacctagtttcacaactatgattatgggaaattaatgtcaataagttagattataaattttggtttttgacttataaaaaaaaccaactaataaaagtgtaacaaattaagcatatatttatgatacaagaaaaaaaatgtaaaatgatagtttgtggctcctttcaaaatcaatatcatctagcaacccacggcattataatctttacttaaatgtggtatcaaattcttttaacattggcaatctaattcttttatttttatttgatttttttttttgggtgctataatcaacttgattacacaaggagtattctcaagtactctttgcacttcctttcccacactaatactcactccttaatttggtacaacatggcttttacaaggacaaaccatataaaacaatgttcaataaccccactaatctagcacaaaatgttgtatgaacaaattgggcatagtttcatattagcatgttgttaacagaacctcaataagaattatcttaaatttctttgttgattttgtgagaattagttgtattttttttgttgatttttcttggatctaattgtaatcttagttgtatttttcattccatcagtttgttccattttctatggtaacaaatcattgcttaaagaagaagcattcctctagttggctgccaaagcacacttctccaacagggcaatcttctttggatatcaatccctaacaataaaaacaagttaagcatgacagttaattttgctcttataatttcatatgttaattatgtttttttttactatataacaaaatttgaattggatatatattgaagataaaatttattaattcaagatcttgcttattatttaaactgatttctttttctggtggaagaagtttgatgttgctttatgtaaagatcaaagtatgtaataagtaataaccctacataaggtttacaatgatacctttcaccatgacctacaaacaaaggaccatcaacaagaatggaatcaaaaccttagaatcgatacgattaaatatcagttgggtcactcatcattaacataattaccttataaaggtctaaactcctttctaagaccatgatttgttttccttttgattgaatcaatagaaaacaacatcccaaagaaacaagcattccactatttcatattaacaactagcacgaagacactcaaagaaagacatatagtatggcacaattttattattattttggtacatggaatcttttcgtgtatacatacaatttggttttttttattacttataaaatctaaaaataactattcatgtatatactaatatagtaatatattacattgaaatggataagcatattatatatatatatatatataatgatttatatcttaatttccatatttgattattattttaaatatattataaataaatgttttaatattattatatatttaaaaatcaatgtaaaaatttattttacaattttctagacttgaaagaactatttatataaatatttaatgttattaatgtaataatatttatacaaatatattaataaataacacttttttctaaaatatgacctatttttgttatttaactaattttttttttcaaaatagcttataattttttaaaagaagtaaatggttatacggattgacgatccatattgtccatatggattgacaatccatatggctcatacatatcagtattttacatatgaaaaaaatttaccgcaacattgatgatgacgacaacaaagtcaatacaggcaacaaaccccgccaaaatgcaactaacaaaccatcacgagctaacagaaggaggagctcaacgaagtaagaaaaagttgaaaacgaaaagaaggaagaagtacaaaaggacaatcttggaattaaagaaaaaaagaatgaagtatttgagatttgttgggtacaagaagaaaaactcaaatgcagggggaccatgtaaggtgtgttaggagttaggtcgagcccaaaacacactaaaaggctagacaacttcaaagaaatatatgggggttttgctacatacactatttatgtgaacagtgtgcggacgaaaatacccttcgtgatttgaaggttatggaatttacatatttaaggttttttttttttttacagattgttcaatcaatagtgtttttttttatggattgctcaatctgtatgtgtttttttcataagttaaaatatattttacgaaataatttaaaataatggtgcaagcaggtatgagaccttcaggttattaacgtgatgctcaaaccaactgagctaataggtcaattatgttacaaaataattaatgttgatacatataacgccaacttttttaatgtatatttaatacacatataattttacataataaattttgtaataattaattttgatctaataattaaaagttttttttatgtaaaattagatcaaaattatatgtaaaaaaattaattattaaaacacatacaaattgggcaatccataaaaaaaacacttatggattggacctaatccgtaagataaaataacttacggattgcccaattagtaaaaagaactcgtacggattcacgaatccgtaaggttcttatggattcgtcaatccgtatgaaagttacaaaattcataaccttcaaattacgaaaggtattttcgtctgcacactgttcacatataatgtattagaaatatatatggtgcatgtagcaaaacccaagatatgggcttatgatcctgtttggacattagcaaaatactctctcctagacaaaaaaatgtcactactaccaccctcacaatacaatcatggctacccaattccatagcctctctggtaatttccatttggttaaaggacaactagagcaatcaattcttgaagtgttcaatgttgtgaaacaaatagggaggggtattggaatttggaaggcaaagatagagttttctaaattagagtaaccaaaatggccagataacacaacagagctattaacaaagttgaggattggaatcccaacaacaaccaatatctatgaattcaagaaattcctcaactcctcctttgatgtgttctttgaaaccttgaccatgtgtttggatggagaattctagcaatttaaggaaattaaaatacatagcatttgaattacttgtaattaaattcccttcattttacaaataatttgtttggataaagcatttcaaattctttgtatttcaatttacttgtttggataaagtaattcaatttcctctctacgtaaaatattgtttttaaatatttaaatattaaaatttcaatattgaacttaattgaaaataaatattaactaatttttaaatatatcataattcaaaataattttaataataattcaaaacatagatatagagaatttacaagcaccaccatataagaatcttcatttataaatttataaaatattcatgatacaaatcaaatcatgagaaaataaattcagtaaataaaatcgtgaaaaaagtaaaagaagtacatacaaataagtgagataacaacttataagtttagcatagcatatgatttctaactattcaatatttttacaaggacaactataaattgaaactttgaacgcataaatcattagttatacaactctcatattctctccataactaaacaacctagataatgataagagggcaacacattttattaccattggcccagtgacttatgcagcgtaggttcgaataatctttggcctggcagtttcagattggactggaggtcttcatcctatgtatggtcctaggcagtagtacaagcattgatcaatattatgtataataaatatttaaatcagcacaaaagtaaatgaaggcttggattattcatcaatttacgaataaaaaataaaaaaactaaaccagtgaattagagatgtattctgattttgttcaaataaaaagagagatcagatttatgtcaaagtctctggaactggaagtagtaatagataatgtataaaggatggcttgtttggcacttcttaagagtaaatcattgggattacggaagagttgcaactgatggtacaaccatatttctaaacatggtgcaaactaacaacagtaggaggcaaagaataccaaacaaacaaaacttaggacgaaacggaagtggtcagtatctaagagattcaatccatgcagaggtgaatggtgtattattattaatatgatcaacataatgagtcatatgactccaaaatcaaaaggtaaattctttttttcggccaagtatgattgaacaagttctaaatcaataaagtcaataaactactgagccaaaacacaagatctcaatggtgattcattaaattttcttgtaagccttttagcaagtgcatgtgtaagtaactatactcagttatatattttgctatcagtcacccaaaaaaaaatcaaatccctccttgagattcaattggatccacttctagcctaaccagaattccaaaatctcacatacctaacttgcaaaatgctaaaaggtaaacatttttatttgtaataataatcaaaatcaaaatcaaaatcaatttccaattacacattattatggtgatatgtccaagtacttctaattaaccagaaatgttgtaaagtagaacatttgagtcatctctagcatgactatgttctatttgtttctacccctaagcataattcatacgcccaaagcacctaaattgatcaatgatggcttccaatgggcttattaatggagcaacttgtaagaattctgcatgaccttaaagaacctacacttcacatcatcatttggatggtttaggtgctcaatgaaggattaaatgttgccttggtgcattgatacatttctcaaaacaaaaaaaagcaacaaaggaaaaagacaccctataaatgtgatttcaagttcatgaaactgcttgaattttctccacaattgtaggcatcatgctgcataatctctattgtatatattatcaacgaattgttcatgtaacctcgatcaatcaacgaaatcagttctcaaatatttctttaaaatgcactttcaacctcagtctcaaacacaagaatgaattgcaggtaccaagacaacgaaatcaaacagagtagaaaacggaacctagaaaccctatgattaatatgcaaacaaacaagctttgttgttcaaaacaggtgttaaatagctatctgatatatgctataaagtgaaaaaccttgatcacatagatgagagagcgagagagcatacctggacaaatcaccgtgagaaagagaagcgatcaatcaggagagaaaaagagagagagcgagaaaacgatcgcgagagagaatgcgagccttgctaaagcgtaaccatcgctgcaacttgtgagtgtcgagacaggacagcgacagagtgctggtacctacgacgaacttcttatgcaaattaaggaaaatgtaagttttctctttttcaaagcttcctttatttattgtttcttaagttttttgggcatgagtacggttcacgttagccactttctagtgtcctttttagaggcacacaattttttaaagtttaattataattttgattctctaatttaatttataattaatttaattttcttaatattaaaatacttaattagatctataattattaataataattcaattcggtttcttatttttttaaaataaattctgatttcattataaaacaaattcagtctcctttttcaaattttttggagcaactaaaaaaatgatcaaattaaattaatttttaaaaataaatgatttaatcaattttttttaaaataaacaaactaaatcatcttttaaaattagaaaacttaattgaacctttttaataataaaagtaacaaaatgaacctaaaaataaattaaaagatcataatagtaattaaaccttttttcttagttcttattaatattaaataattttgttttgatttctattgaaattattttctaacaatcttaattataaacgaattattagtgattttggaaaaaaaaaattataagaaagacaaaatttaaatgattatgagaatacaatttttttggttggtccaggacataaaaaaatctcaggatataaaaatctcaaaaccaacctgttctggaaataccgaaatcccaggaaaaagataagataagaagttatcaattcaaaagttcaaaatttcaacatatcttatctaccaggtacatgatatctcctatttaaattaagataattgttcattatcatctgctattatctttttaatagattatttgcaagccatggcccatggcccaggcccatatttcacaatataaatacaacaccccaggtattcaccaggtacacacttttctgactctctcttttcaatacacaccttgcacacaccccacgtccaaattgtggtgttttttcctgcaagtgtgatcttcttccctgagctgttttccaaccatagacatcttcaggagagagagtttgatcccatagcaagatttccagcaactttttgttggaaacacttctgttctccctgaacagaacattggcgccgtctgtgggaaagttaaatttcaaatcccatgttcccgatgataaacacaagaagtaacaattagactgcacacccacgctctgatacagaaaaaggagaggagaaagataacatccaaattcgcatgttgagaagaacagaaactgtcatccttcaatcttctcgatctccttgtttaactgttagatttttctgaaacttttacaacaagtacgtgactcatcactcttcgcatctaacggttggtttcttgaatcgaggcttgaagcatcaccagaaaatcccaaaccgaaatggttcagaatccgttttctgaagcaggcagcggtattgcgagggagatttctctcacactaaccgttggatcgcgttaaaactttgaggaaagattactcaaacctgtttctacattcttaccgttcggatcattcattgaagcgttttaaagagggaatgtttcaactgcaaacaaagattatcagaattcctgctctcttttatcttgtttcgggcagtgatattgagaaggaggtatctcttttatcaaccgttggattatcctcaaattcggtcagtatgttcctctcttgcaatgaaatcaatttgaccgttgagatttgttaataattatttctaatggtagaaattaatttcgtacacaatcctattttgtatgcctacctcttgtgatgttttggtataatttttgttgaaattgtttgttaattgtaatggttgccggaacccttgcgtaatctcattttattgatagtgaagaatttgggtggattccgagataggtcccatgatttttacttatcacattgagaaggttttctagtttatagagcagcgcttcaaatggaggaacacggagaatccgactcataatgagaatcaagaaatgttgcacaaatagaagccaatccagacatatagttgcgaggcaatgagtccagttgagacttcatccacgccgctgaattagatgatgagcccatgggaaacgataaaattcgattcccacataataatggtgaaagcataacagctgcaaatcaaaatcctaatatgatggatgcagagcacaagaaggcaacgcaatatcactttatgagggtggatcttgtctcacgagcggaaacacagattatattaagcaaaagatggttaagttacagaaattgaatcttgagggtaacacccaagagagggttaaaactcaagaattgaatcttgagggtaaagcccgagagagggttaaaaactcaagaatcttgagggtaaagcccaagagagagttaaaaactcaagaattgaatcttgagggtaaagcccgagagagggttaaaaactcaagaaccttgagggtaaagcccaagagagggttaaaaactcaataattgaatcttgagggtaaaacccaagaaagggttaaaaaatcaagaattgaatatcctcatcaacctcgattcagtgataattgctagcatagcttggcaggtcagagtgctgaccaaccaagctggggggcatctgttaggtgtcatgggttgctgatatgtatacacgaatttctcttttcagagatcgtgaaatgataaatcgatatctattcatgtattctttcaagagatcatgaaataatattcaatatgaatccttatttaaaggaatttatatattgtgcgcacaatacgatatcttgatggtccgcatatcatcccggccctgatcaggtcggaataactaactcgagggaaactgaagaattcagtcccgttgagcggttatgatacgtcggccattgcggttctcggttattaactagccgagttctgaaatccaacattgacctcgacataacttggggggaactgaaaagatcaagtcccacaagtcattgagcatcgattgttgtagttctcggttgtccagaatcaggaatccgagacctaatattgatctcggcaacgcaatacgcaggccgagatccgatataaataaacttggtcatgaaaccaagacacaaagataatatatgaagaaatgcgaaaagaaggcgaaaagacctccaggaacgtgaagagacagaaaaaggggcgatcattcacggaagagtttagaatctcccgaggtcccgacaccagagcaccatctcggccaacaaaatcataactcggtcctttgctgagaaaaacaaaaccgagatcctgatacccaaaaggccatctcggccgacaaaaccaagaatgcggtctcataccaagaaaggtaaaatcgagatcattcacctcgcccttaatatccaacaggtgattcaaccatctcggctacgacaaaccgacaattgttcacccgtcagccttaggaaagtaaatgactagtgcagctcggcagatcagaatgctaatcaatcgagctggggggcatctattccggaaataccgaaatcccaggaaaaagataagataagaagttatcaattcaaaagttcaaaatttcaacatatcttatctaccaggtacatgatatctcctatttaaattaagataattgttcattatcatctgctattatctttttaatagattatctgcaagccatggcccaaggcccatatttcacaatataaatacaacaacccaggtattcaccaggtacacacttttctgactctctcttttcaatacacaccttgcacacaccccacgtccaaattgtggtgtttttccctgcaagtgtgatctttttccctgaggtgttttccaaccatagacatcttcaggagagagagtttgatcccatagcaagatttccagcaactctttgttggaaacacatccgttcttcaggagcgaaacacaacctattgtcttgttccataagatgaggaaagttttaaatttattccttagcgcttcagtcttctgtatgcagcagtatgatgctgtggttggggacatgacaattgtggctaagccctcaaaatatgttgattttacaatgccattttcagaatcaggtgtgacaatgttggttttggcaaagcataatgagaaacaaagcatttggattttcctgaagccatttagttgggacctttggttgaagattggtgtagctttaattttcattggtttcattgtttggttttttgaacaccactaacactcaggggcactccaaagaaccaaattgtcatgactctcggtcaatcatgatagttttgattccttcttacttgcaaatattcaagaaagcattagtaatatgccttctaaatttcttcatgaaaaaaaagaaaaaacctctgtttttaagtttgacttttttaacttaaaacctttgttggcaggggagagggtagagaacagttggtcacaatttgtgctgattatatatttctttgtggtactcatcataacacaaagttacattgcaagtttagcttcaattctcacggtacagaaactgcagcctgtgtttgtggacgcagaagagataaaaacaaacaattactttgtgggatatcctcaggattcctttgtgaaaggattactaatagaaaaagctaggattcaatgactctaagttaaagggttatcaaggccctgaggcctatgaacatgccctgtctcttggaagcaacgatggaggagttgctgctgtttttgatgaaaatgtctttattaacctctttctcatgaaatatggctgcaaaaagtatcagattgttggacccagggacagttctgggcccatgtaaggtgttcaaccgtacagggccccaaaaaataagaggcctcaaatattaattactgcaacatatattcaatattaaaaactagaggagatgataatgtttatttttaataactaaggggtccaaggttcaattcccaccaacaacaatttttattacttttacattttatttatttttaaattaccaattgagggccccgttttctgaaaaagtaaaatattaaacaggacccccaaaaaatttgtcaaagtttgccccgccctaaaaagccagtttgaatttgaatgttgtctcttattgtcataatttttttgacctatgcagatattgcgtgcggtattattttgagtttgtgcacttgtgtattaaagtttttgatggatggcaatttaatttgttactagtatttattttaccatcctttgttaacatgtgttcttacttcggttatttgactgttttgaatgatatccaactgatcaagagggtgaaagaaggtactttttcctctttattggagaggtcttaaaaaaaggaaagaaacaataaaatgaaatttttgtctgcttaatttttttaattaaaatattccatttttactttaaataatctcctattacaatccctttgatcaatctcaaatttgattgtgtactttttaaattttttaataaattaaaattattagtaattaaataattttagaaaatgttatttaaataataaaagatagtgtaaataaaattgtggattttataaaagtgaaaaatcatgtcttaataaaaaaattgagattaaaattgtaaattttttaaacatgaaaaatgaaatatcttgattaaaaaataaagagattaaaattatatattttgaaaacataaaaagatgaatattacattttaatcaaaaaaaggaaatgaattctgcctgtcttttgttgtcatcaagacttgttttgctgtgagatacgttgttgacatcttatatttaatgatttaaaattaattatactactccctctgatccttttgcctaaataatgggctcaatcactcttcatcgttgttactgttagccctaaaccttattccttcaatcccatcataatattctgcacatctctcatccacattattatctaagtgaacctttttaacacttttcctaatcacttttcctctacattgtcttcatcttccacaactccactacacttcccatcacctacactcccattcttgcttgaattaccctatgtattttcttcatgatctatataaaagtctatttgacatttgttattcatccatagctccccatttcagttgcatgtgcatccaatacaatttttctcaaaccattttcaaaggtacaactttgattcttccgccacaacttcaacttaccttcgtatccgaaatcatccttcattcttaaggcttgaaaatatgaccatctatccatctctatcccatgaatgacctccacctctccacttttgcactataatttgtggtcccatataattttttattagtaggttccatacaaataactctttgggatgaattttaagagaaaaaagtttcttagatatgatgtgacataattgataaataatatttctattaagttttatctcattaaacctgcttatttgttcattagagatccttaactcctaataaaattgtgaacaactttcttttcacattatatataaggatttcttggatttaatggtcatttagatgccaggattgtaattcctattaagcaggatgtcagtcccatcagcctcttggatttaataatcaagtaaaatatataatattgattataaaaaaaataaagataactaataaataaatattagagattaaaaaaattgataaaatatttaaaattaaaaaatattgtttggtcatttgtggcagtttttaaaactgaattgcaaaacttgcaaaattataaatgcaaaaggtatactttgtgacaattaaaaacaattacaaaattttctagtaaatttaccaacgttcaattaaaaatcatcacaaatcatttttgacatccgtagtcttgacgattgttcttgaccatcataattgcattttgtgatgatttttaatcgtcgaaaataacttttttaaccgccacaaattgtagaattttttgtagtataagataactcacgaacgtgggttatgggccctaatttaatcacaaaatcgggcttgtaagatgagtgttaccctctacttatgtacactaatgtttttatattactagctgttatgagatctctaacaacccctcatgccaaggactagacatctcgagcacgaattttgtaggactgaacatatgtgggttatttgatagtaattgaggattgtctcccacttatatacacaaattcgacccatatcagtaattgatataggatctttaacatgcaacaagaaaaacacaacaaatctttttattctaaaacatgaaggtggtcatatctaatatgaagaagtaatgaaaaaaccatgctatagttgatacagaccagctgataccaaaggatgaaaatcagaataagagggaatggaaagtgtatcagaggattaatataaagaaatagttagtggttgttaggttgttagtattgagaagcagtaagtaagtgtttttagtacatgggtattattatatagttttataaatataggtgcagagggtgttagtggtggtggaaaacaatattatttcattttgggaatcattataagagacagtggtctctgggggaattaggaatttgtcattcctaatttctagttattgattgtatagcttttcttcataataatagaaactttgcattttattcagaatattactatgactgtttgggattcaagaattacctttcttggttcttatcaatttggtccgacttgtcggccttctggtttttcctggaggtgacgcatactcgcgatgtcggcatccgagtcgagggttgaggctctcgagaaatccatggcaattgtgaacaagaaactagatagcataggagaagcatgtgaatatatgtgcgatctggtacagaagagggatttggacttgtcggacgaagccacttccgggggcgcaagtggcggatcaaacacgaaaaccatttccatacgttccttcacccgaagaattgaactacctttgttcgaaggcgatgacccactgggatagattgccagagcggagacataatttgaaatgcaagaagtactagaagatgaacatgttctgatggcgttcgtaagtatggagggactagcgatagcttggtataggttcttgaggaagaaagaacccaatcagaaatggcaacagatgaaaacgacgatggtgagaagattcggagggtgccatttggatagcgcatatgaaagactgacgtgactacgaaaagcggattcagtggacgaattcatccaagaatttgaatccttggtggcccaggtgccgacgataggagacgaagtgcttctgggtttctttatgggaggtttgaggaacaaacttcgcaatcagattcgaatacatgaaccagaggatgtcttcagagccatggaccttgctcgcgatattgaacaatcattgtgagtcctatggacgggtttgggataaaacctaggacaaacatgagaggaagtgggacgacatcaaccttcgcatacaaggcccaacaaggaaatggacaaaaccaaagaaattatctgtcggagagtcaacgagtcataccagggcgtgataaaccatcagaatgaaactcttttgctccatcaacggacaaaggaggtagtgggcaacagctaagcgaaatgaacagggtaagaagcatcccttactctgaatatgtgaagagaagaaatgaagggaggtgttttcagtgcaaccttccttatgggtcgatgcatcaaagtgcggaaaagaacattagaatcatgatcatgggtgagtaagaagaaaatgaggaaataaaggaagattgcgaagaggcgcacatacaagtgcaagaaattgaagaggataacagtgaaagtaagaaagaggtgaggtggatgaatctctacttattctctgcaagagggctcacccaaccaaaaaccatgaagctaagaggaaccctgaatggtaagtctgtttttgtgctaatagacagtggagcaagtcacaatttcataggaaagttagtgattcagaagcttgggattaacagtagcgatacgaaatctttttgggtcagattgggggatggacaaaaactacaatcccgagggtgttgtaaggatttgaaactgaagattggatcacatgaggtcaaaggaaaattttttgtttttgaattaggcagagtggacatcatcctgggagtaacttggctggaaacactaggagaatttaaggttaactggggaaaattaaccatgcaattctgagtgggcgagcagaaggtgaacatttgtggagatccgagtttatcataagaaatggtctctgttaaagtaatggagaaatcgttacaatcatcaccagattctaatgctattctgcaatatgatacaagaagaagaagaggcagctaggagtaagaaaactatcttatctacacagcaagaaaatcaattatccaaggtgttaaaggaatttaatgagattttgaagaacctttctgtttgccctccaaaagagaggtagatcataaaatacctttaaaatcaggttcggatcctattaatgtaaggccttatcgatatgcttatgctaaaaaaaatgtgatagaaaaatttgtgacttagatgatagcatctgggattataaggcccagtaacaaccctttttctagcccaatcttgctggtgaaaaagaaggatggaagctggagattttgcaacgattacatagccttgaacaagccgactattccagataagtttcctatacctgttatagatggattatttggggctacttatttttctaaactagatcttagatcaggatatcaccaaattaggatgcatgaggatgatattcctaaaacaacttttagaactcattaaggacattatgaatatatagtaatgccctttggtttaacaaatgctccagctacttttcaatgtgctatgaatgctgttttaaaaccttttttgagaaaatttgtgttgatttttttatgacattcttatttatagtacaaattgggaatcacacttagatcatgtgcataaggttttgaaattgctgaaattaaattgtttttatattcagagaaaaaaatgcagctttggaaaaatgagaatggaatatttgggtcatgtggtttccaaatgggagtagaaatgaaccaaaaaaaggtagaagctgtgattaattggccaatacccaaatctgtcaaagctgttagaggttttttgggactcactggctattataagagatttgtgaaagattatgggaagattgacaaacctttaatagaagttcttaaaaaaggaggttatcaatgggaggaaagtactcagaaggctttcaaggaattaagcaaagctgtcactactgctccagtattggcattacttgatttttcaaaacaattttgcattgaatgtgatgcttcaggaaaaggattggaagctgttctattccaagaaaaacaccttattgcttactttagcaaggcattaggtgaaacttctttagccaaatctgtttatgagaaggaacttatggctttggttttagcaattcaacattagaggccatattttgttaggaaggagatttatagtatattcagatcagaagagccttcgttttctcttagaacagaggattactacacaaaatcagcaaaactggttggctaaattactgatttgtgattttgaaatcagatataaagtgggggttgcaaatagagtagctgatgcactttataagagaaaggaagaagtggagttaaatgccatttcaaaaatataatgggctgaagctgcagaaattgacaaagaagttttacaagactctactttggcaaaaatacattctgatttagaaaaggaccctaatactcatacacattacacacttgagaatgagagactttactataaatccatattagtgatagcaactaaatcagaatggattcccagattgttggctgagtttcattcttctgtaatgggagggcatgctggtgtatatcggacttatagaagaattgcacagtctgtgttttggatgggaatgaaggttgatataactcaatttgtagcagaatgtcaggtatgtcagataaataaatatcaaacctcatcacctgagggccttttacaacccctgcctataccaaattcgatttgggaagaaatcacgccccctcactaatcagggtcattaccaagcataatcacaatcaaacatataatcgatcagagtttaagaagtttggaagcatatatatattaaaagtgacatcatcaaatgtcatcatcaaatacactgtacatatactatggtgaatatacatcataacctgtttaggtacaaaactgtacatcataatatcccctcagggtacatcaaaatcaaaaccaaaggcaaatacaaaagtatctgagctataagctcatatcatctagcctaaggttctcaaacaacaactatccctgcacaggcctcttgccttgggatctatctgctcctcttgaggtatcacctgcaacataagtcccataaacggggtgagatataaaatctcaataaactcagggcccttgaaggtatttccttcccctggttcactgacaaacatatatatatatatatatatatatatatatatatcaacagaatcacataatcatagcaggtaatcattcaaaccatcatcagtgtacatcaatacacgtccatctaccaaaaccagggtatactcatggcatacagccatatatcacatccataactgccatgcaaaggctacatctaagtatataggaacatctccacccagggaggctacctctatatactaggaacatctactgcatgtataaacctagcggaggcttcatctgtatacataggaacatctctcacacgaggcttcatctatgtatcaggtacatctccttctgatgaggctacctctgtaaatatataggtacatctctgctcatgaggctacatctatatattacaggaacatctcatctgatgaggctacatctgtgtatataggtacatctctacgccgaggctcctctatatatcacaggaacatctcatcttctatcacaatacaattgcctgaggaggctacatctgtgtatatgggaacatctccatgcgggaggctacatccatatcacaggaacatctctcaacaggtcttactcacctcaaatcatctatcctaccaccataggatactattcaagcacagcatgcatattcaagtctcatattcaatcaggcatgctacaaatcaggcaaatcacagccatgcatatcaatcccctatcacagggttcaatccacatttcaaacatcacatgccaatacacatcaattcccccatctcagggttcagcaagcacatcatcaagcaatcacattaatttccctctcacagggatcagaccatcaatcatccagctattcacagcatccacatacatgcatacacgcatatcagaaccatcacctcacttggtgcatggtggaacacagtaaaggatgcacaaacaagaaccaagagcttacctgctctagacagatcaccggctctcccggcctcgtggtcaatgccaccagagctgtcaagctcacgtcctacacaataacaagaatgtatcacatcaaacacggttctaggccgttcaaacgaaaggaaactatcatcctttctatataacatatatcaaatcactgtacaagtgattctcagacccttaacaggatcttcctcaacctacaccaggctacagagcctctactaagactctaatcaggcttatataaagcatatctttgcttaagcctgctcaattccaacttctcattatcagcagttcaagctcataaacctcatctatacaatctcatgagcaactttgtcatctgctctaaggttcatactagtcaaatcactagccttttatctctgctcatacacactcagagccaaaatcaaacttcatcagtaatgatgattcaaggctctaacttcctcagaatacctttctgagtataaaactttacagagtccaagcctaataacggctctaacacctccaaaaacacccctcaagataaccctaaaaccccgaaatctaatacacagaaccaacggttagagctcgagtttcttacctctgtgatgttcagaaacaccagggaatcactttccctaaggtagctcgctcaatccaggcctccttcgcctttaaacttcgagctctcatgggttctctcagagaaatcactctcactgtttctcaccttttatcaagaatcaatcgggggttctcacttatctcgaggctctgatcactttctcagttgggtcggaggtgtttagatgaacgatggaggagatataaagctctgtaactcatcaatggcttccctctctctctcttccctccattttcgtcccaaatgagccctatatataggcttcccgagagtcccacgcggatcgtgccgtgccccgcgctgatcacgccacaaattgaatcccacgcggatcgcgccattccccgcgctgatcgcgccataggctcgggtctcccacgctattggcgtggtcttccacgctattggcgtggtcttccacgctaccagcgtggaactccagaggaaaagtctggtttctagggcacttcccacgctgttggcgtggactccacgctgtcagcgtggcatggcagagccaattgccctcattttaacctccggcgcggttcgcgccaactggccgaaacagttttctcacttcttttacactgcctttttagggtttccaagccatatctatacttcttaatcataagcttaatcctaagcttaaactcatgcttaatctaagcttaatcacatgtttaaaatttaagatattacaattttattactggacttccaaagtttcaaagatatgattgtattttagtagtggttgacaggttgagtaaatatactcatttcataatgttaaaacacccttttacatctagaaacatagctgcagtgtttgtaaaagagattgttagattacatggtcttccagcatctatagttagtgatagggaccctatctttatgagcaatttttggaaagaaatttttaaattacaggggaccaatttgaaattcagtacaacatatcatccataatctaatggccaaacagaagttcttaacagaacattagaggtgtattcgaggtgtttttgttcagagcaacctagagagtggggagaatatttagcatgggccgaatattggtacaacacaagttatcattcatatgcgaaatgtactccttttgagattgtttatggcatacctcctccttcaatttcaaggttcataccaggagaggcattggtagaagtggttgctcaagatttaataaacagggatgaagcattaaaacaattaaagtatcatttacagagggctcaacaggtgatgataaaaagggaaaatattcataggagaaatcacacaatgaacgaaggagattatgtgtatctcaagattagacctcatcataaacagtctatgatcagaaatttgagtcctaaattggctactaggtattatggtccttacctcattttgaaacaaattggggttgtagcttttaaattacaactacctccacaggccagaatacacccgattttccatgcttctcaattaaagttggccaagggagagcataaggtggaagctagtttacctgaagaattgagcattgatttaccaatttattctctagcaagtgtgttaggagatagatatgtaaaacaaggaaatgatgaattgcatcaggtgctaatctaatggcagggacaaactaaggaagaggcaacttgggaagaatatgagatgattcagagtcaatttcctgattttaaacttgaggacaagtttgattttagggagggtggtattgatacagaccaattgataccaaaggatgaaaatcagaataagagggaacaacaagtgtatcagaggaggaataacaagaaatagttagtggctgttagacggttagtattgagaagcagtgagtgtttttagtacgtgggtgttattgtatagttttataaatataggtgtagagagtgttagtgggggtgggaaaaatattatttcattttgggaatcattgtaagagatagtggtctatgggagaattaggaatttgttcctaatttctagtagttattgattgtatatcttttctttataataatagaaactctacgttttattcagaatgttactgtaactgtttgggattcaagaattacctttcttggttcttatcaatagtcataatattggtgttaagaaatgcatattaaatacaattaagtattgttttcaatggaggagacaaaagaaggagcttccaacaataacggttaaacctttcacttgtgtaagctcataagcaagagaaatcaaggcataatttggaggcttcagttttggtatgtcatatcatgtgtcatgcttctcaatgcttaaagcttagagatccttaaaataatctacaaatcttgatcaaactccctcacacgactaaacgtgttgcctaaatttaaggaaataatcttattttgccaaaattaactcactttcatttagaaaaaaattcataaaaaattgtataaaagatccacaagaaaaaaatgtgcaagtaaaagtcaatattatataagcttttgtataccaaaatgaagattaaaaaaacagatcgaaaaaataggcttgaaaaatgtaaaaaaaaaaaagaaaagagagagagactttttattattatgaaaaggcaattaatgaaataattgatgtatacaaaatagtatttaatcaatcataagggttgatacaataaaaaacgaaaatttggcatgcaatattaacataaatttgtctacataaataaccataataaagaaaaccattaaggattacattgtttatgttccctcgataactaaaaatttacaaattaatttttttatgttttttaattatttaaaattaataataattgacaaataaataatttatataatattttgaagttataatggatatatctagtgacatgattatttttacatgagtgttatgcaaatcttcatgcttctaacccttgttcgataaggcgaacgattgacttgctgtgacaagtttttattaacttcaaggaggtctttagctttgcaaattcgatgtagtgaggtgtagggggaatcttcatctttttcatctgaccaagaatgctcttataacatctaaatttacacaaaaacataaaaaattatcttttttagtttctaaaatcagtttatataatttattaacaaaaacaataattatgaacaaaaattctaaaaaaaactaagataattacttacaaaataaagtgtaaaaaataattatcaatgaaagtgggggaaaaatagtacgacttctaaaatattccattgacttgtatggtttaatctttaaccatttgtgataagatttagcgatcattgtttattcttcttagccttacactaaaataatcttctcactaaatatatctcatatgtaatatatatatatatatatatatatatataatttataannnnnnnnnnaaaaaatctatatgcttattaattttttttaaagtgtttattttaattatttataagtttaaacaactgatccattaagagtacatgttgtaagtatattaaaattaataaaaaatataaaaggagacaaaattttcattattattaattaatacattaaaaatagaaattaaatactataaattaattaggtagaaacacgtgagtcaaacatgtctcctaaaatgaatatctctgcacctacgataaaattattaaatagatctcattttgaatttcaatcaataaatagaaaaaataactaaaatatatgatatattttaagatttaaaattttcatgtctttccaagaatttattggacaacaatagaagcatcactaacaaatctctacttgattagttgattccaaatgatcatgaaggtggttatatgcaatatgaagaagatatggggaaacatgatacattacaccacagcattggaataaagaaacacacattaaatgcaattaaatatcatttttaatgtaggggataaaggaagaaactccaaacaatactggttcaaggagnnnnnnnnnnnnnnaacaacaacaacaactttgtctctaataataatcatgcttatgatcttgtggagaagaagttgcttaaggttaaggatatcaagtttaagtctgttgagtttgctgcttctgataattattcaggtcctagagttttcagatatggtccaaaaaccgaaatggtagactcagatttctcaaatgatgaattcaagtggtcaaagttgggggacaagtcaagcaagtacgctgcatctgtagtgaagaaactagtgatggaggattcggattatgatagaacatatggaggaactacaaggaagtttgattcaagaaagaggagcaactataatttagttggtgtttctagcaagaagatagcaaatgggtttgtcaatgaggtatatgagaatggaacaaaagggtggaagtatgagtgttttgaaggtgaaagggacaataatggttcttatgaatactcaatagacgatgagagtgatgaaaacagttcagagactgaatcttttcctgctccaaggtctcatcataagagtaaggctcnnnnnnnnnnttaaatatcatttttaatgtaggggataaaggaagaaactccaaacaatactggttcaaggaggcagtgtttataagttttgaatccttagttatgtttttttattttaagttttaccgtaatacaactatacaattcattaatttttattttattcttctaattttgtgaattatatttgtaagctaaaatttaataatgaaacaatgttacatttaattctttaataacttattcagtcactatcttataatataatttatctcaaattaaatcttgataatgtaatctttaaaaaatccttcaacaatcattgacaataattacaagaaataataataacagtattttatgaacattacatgcactaattttttttaacataatttaatattttttattaggacactaatttcttttgttagtaattcttttactaactttaatttagaaaaaaaatgtctacactactaaaatgtaaatttatatacacacaaacatatcatacatatgcacgcacgcatacacatatttaattgaatatttctaatttttatgatatattagtttgtgtcacgaacaggacaaatgtttattttatataacaaaaaatttcttgtataaaatattatattataatcaaaattcttataatttttttaaaatataattatatttttatattatgatagctatttatattgttatataaaattactttaaattattaataatttctttaaagaatatttgaattcaacttaaaaacaaagatgaaaacatggattgtgcaaatatcattaattattactttttaattttttctctttccatttatcttttatattgttcatcaattctcctccaacaacacttcacccaacacaaagattaatcaaacttcaaagagcaaaaaataaaagttttggcttggttaattaaatagctagctcttatatattactatgaataattattctttaagccactgctagtagtagcatgaaacaatcttattgcttcaaaatttgatttttttttctctcttttattaaatttcatttgtgatttgtcactccccatgtatatacatgccattaaatttgagcattctattaggaaaacgaaaattaagggatcttctcccctttttgtgggttggatcttgtacttatggaactgtcacatctgatcaacttgattctcttattctgatgatcaccaccacaccaccacctggttaaaaaagcaagcaactttggtgtgatctgaattttgtccctttttctttctctctctctaaattctctcttccttatttcaccgtttttgggaagatgatcatggaatgaatgcttgatatatattgacctttgttgggtataataaatatctgttttttttttcttctttttctatttttctgagtcagattcacatcacatatcacatcatcaaaatccatggaggagaggaagaagtatgtgtgcaagtattgcagcaagaggtttccatgtgggaagtctcttgggggtcacatcaggattcatatgatgactgaagaaagaaacaacaactacaacaattgtaatgttgttgttgatggtgatgatgacaaggacaacatcaacatcaacaggttcatcaagttggatggtactgtgatgaggaatactaataacaagaagagggatttatcatggtgtgaagatagcaataacaatcccatttatggcctcagagagaaccccaagacaacaatgaggtttgtgcattcttctggtggtggtgccaatgccaacaacaatgagcaacaacaacagaataaagaggataagaggttctgcaaagcatgtgggaaaggttttccatcactgaaggctctctgtggccatatggcttgtcactcagagaaagagaagagaacaacaacaaaaaccatcaagtttgaagagaaattggttatggatattcattctgacactgagacttcaactcatccaaggagatccaagagaatgagggtgaagaagaccattaacctttccaatcacaaccaccctttttctttttcttcttctccttcttcttctggtgtttttcctttggtcaataatggttcttcaccagtgtcagaggtggagcaggaggagcaagaagaggtggcaaggtgcttgatgctgttgtctagagattctggcagcttcaagagtcgttgttttgcttctgttactgaatcttctgataacaattcggttattctagaagcaaaatcatcctctcctgataccctgattggtgtcatcagctatggtaataacaacaacaacaactttgtctctaataataatcatgcttatgatcttgtggagaagaagttgcttaaggttaaggatatcaagtttaagtctgttgagtttgctgcttctgataattattcaggtcctagagttttcagatatggtccaaaaaccgaaatggtagactcagatttctcaaatgatgaattcaagtggtcaaagttgggggacaagtcaagcaagtacgctgcatctgtagtgaagaaactagtgatggaggattcggattatgatagaacatatggaggaactacaaggaagtttgattcaagaaagaggagcaactataatttagttggtgtttctagcaagaagatagcaaatgggtttgtcaatgaggtatatgagaatggaacaaaagggtggaagtatgagtgttttgaaggtgaaagggacaataatggttcttatgaatactcaatagacgatgagagtgatgaaaacagttcagagactgaatcttttcctgctccaaggtctcatcataagagtaaggctnnnnnnnnnnnnnnnnnnnnntcaggccaagccttagggggtcacaaaagatcacatttcattggaggttctgaagaaaacactgttctgatcaaacaagttgttcctaatttccttattgatctcaatctacctgctcctgttgatgaatagagaaattgttggcatcctggtttttttcgcatcattttgaagcattgaggtactacttagaatgtttttgtctttatcccatatgataaaagcaatatttttgcattgtacagccatgtgggtaaaatgatttttgttcttaacgttttattattactatgctttatttggtaggagatagctgttttctttcttgtttaatttcccatgacaatttggtagtatcttcggttgaaataattttgactattcctatataaccaagaatattctcagaattacattcctttgctgctgcaaaataacaattttcactcttcactgcatgattcaattaaataatattcagaatgtttgtctttccatgtttttcaatttttggtttcatcctctagtggaaatgtagaaaacattatcttaaataatttatggccaatgcatcttgtaggtgatgatcaataaccaaaataatattacttaattttgattatagatttaagatctcagttactatttgcaatgtgtgaatagagtcttctgggaaccaagattgtggaaaatggatatgctagtttgcattttttttttaatgttgttttgctacctaaattacctgaagcgtgttgcttttactttcttaaactagaagaatctttggaggaggaaaaggcaatccaaggttaaagatagtgtagctttaattttttttgtattttggtccaactttgctacccaccaagtatgtcttgtgaccaaatttatccctctagcataaaattcagcactatggtcaattcaattcccgtgatatgtgtagtttctaagagagactgcttagtcccctgaccagaaatttttgctttgaatttgatctaatctcatttattagaattgaaaaaaataacacagtttgattattcttaaggttgaagatctggcaaggcgaataagtgaagaaaaaaaaaaaaactatgaagaaaaccacgttagataaatgatcatattgttgcttgtaaatcaatgtcaatttagattttgtaagaatacaagttttaatttagtcttgaatgtacaacgattaatgttaaattattctttaaaaattataacttaataataaaatagtataattaaattgaatgataaaatataattattatatttttacatattgaaaaactaaatcacaatattcttttctttaaacattaaatcgtctccgatttacataagactaaaatcatcattaattatctaaaccgcattttattttttattgttggagacaaaattgtgggttgaagtggttgtaaggtcgcaaaactttatgattgctccatgtgtacatgtccaacacgtaattgaaatagcagaattggtatgccttttgcttcgtgccaattactatatgtgttgttcccaattcaattcttttacccgttggggtgtatgagagaaccactggtattatagtagtaagtagtaacttagctcttgctctcatctcatgtgggctcaacacagaactgtactaaggtctgtggaatcattacaataaaaaggtaacactaggacttgcaaaaagattaatggagcaataactaaggacttctgcaaaaaattaatagagcaataattaagagttcagtttcattgactagaatataaaagtatttttaaattttttggtattatatttaatttttacagataaaaaaatatattatttaataaataaaaaagaaatgaaaaaaatatgagataaattttttaaattaaaatagaatataaaagagtgagatttatatcaaatttaaaaaattttcttttatttttcttctcttttcgacacaatcgaatggagtctaagagaggatttagttattttaaattaatttcttaacaagcatttataagaaatgtagaataaatcaaactgcgtacatgagttaaaattagtttttgtgtcaactttttcaaaagttatctattctaaattttttatgaacatcgtaaagttacgaagatttcttcaaagttgaaaacaaagtcaacctaacatatttttaggcataaactgaattttaagatgagatcttttcaaaactcacaaaagtaacaaaaataaaaattaaggactttacaaaaaataaaaatgatttctcttctagtaaggttcgacccttattctttaaggagaacatataccttagttatcacatattacaataactaataataaaattatatcaatattaataccaaagaactttaagtaagtaataataaacgttattgtataaatactaacgttaaaaactttttaattttagaagcctaaagcaatggtctgagctatgttatggctgggacaaccctaattaagaatcaaacagttattttatttatcccctattataatgtgtaattttttgaaatgaaagaacaaaaggaaaacaaaaacagagaaaaagagtgccttggagaattaaaactgaagagtcactgcttatttcaataagttggtaaaggactgagtggtttagtgtcatcatgcttagtgattagggaacagatgttgtctcttttacacataaagtaagtgctaagcagacaacttttctttctttgtttttgctaagacaaaaagattattgagattcctgtagccggccagtttaaaatggaatcacaatatgttttttgttttttcttcttctttaattttgactagtgattatgacaaatttagaagtctagtttgactttgggatcatgacaactgattctgtattttgtaaggtatttgatttgatgttgttattttatttatttattgattttttttatctagaatctttataagtaaattgatgagcttaatctttgtctcaagaatttgattaggaaaggcttttttgtgtggagttacaatttactccccctccatataacattagcaaatgaacgtaggttgacacaaacattaaaaatgtaatataaactcttatttttttttttnnnnnnnnnnnnnnnnnnnnnnnnnnnnnnnnnnnnnnnnnnnnnnnnnnnnnnnnnnnnnnnnnnnnnagataatcattttcatttttttaatgtttaagaattagttgtgtcttaaggatttgttcattgtgaattcgaattcaaaaataatttttttacatatgtaaagataaggttagatacaatattttttccctttacatatgtattaggtgaaacctttgattaatgatatacataattttttttagtttaataactagttgattaattacacctgtatgaaattatttacaatttgagtagggcttctgggagtaactctaacatgtcattgacattggttctgttttgacagtattagaggcatcttcttattttaccaactcttttgaagaaaataaaataaaataatacatacatagttaacattttgacaaagaaattggataatattcaattattgtatcactgtcattttattgattaatacgttgtgacaataattacatattttttattataattttgtttaaaaatgcgcaatatatataactaaaaccaaaaaagcattaaatgtatgagctttatgtaatttttgggtgtgttgatttacactccatttgtggaaaagaagcattatctgagtgtcagtgttattgtctcatggaagcaagaggcacacatggatgtacttgcttttaatgatgcagataaggtacaactagtagtagctcacactgatgaatgtgaatttttccaattttattattttctctccttttcactgtcagctgtgttacttgtggaaggagtatgtggattaatttagtgtcgtttgtgctgtgaaaaatgctggtaactggatggtcgtgcatgtatgatgcaccttcgacagtgtgggaattggggtaaaagaatcatcatggagatatctgggaaaaaggtgtaaggaaagttaacttttttgtttttttaaagaacaatgttagattttattagtgaaaagaattggaatttataattttttttaactactaaatcaatctaatatttttacaaaagttaactaattaagaagcaagtgttagcttttttttattttatttttaaaattttgccatcatcatgtagactagaacatttatttatttatataaggttaaaatagatcaaataagtttaattcaattggttaagaaaatgaaaatagtaaattcttgctattgtattcaattcatatatataaaaggtgggaacaagtttagatagaaagtgaaaaataatataaattcatctgggccaatctggtcagatagattttaagcattaagtattcagagttatgcccacacctggtccctctctgagtgctttggtgatggtgactatgctctctctttggtgctttcagcaagacaaatatgtcggacattggattttcttttttaattgtttggttatagggagagaaatgatgtctacctgggctcaatatttaatcaaagttgtcccaatccttaaccatgtgttaactaattttgaatcaacttaatttttcataattgttttaaattagtgaaaattgtgttggagtaaattgcctttttcacttttttttttaaaattaacgtagaattggtttatgtttagaaatatttacatgaaaagaatttaatgggcaaaaatttaaaaataatattatttaattatttaattagcaaaagggggctgtttggggattatttagggatttggggctgccaaacacgcccaggcagggcatgtttggccccccaaatgcctatatattcccctgacaattttcttatttcataatacaacaaactaaatacaaagcacagtcagttaaatcgacttacttgtcagcaacgcttcgacttcgacagggcttcgcttcagaggatatcaagacccacgctttagagagaaggcagaccgatttttagagagaaggcggaatggatcaaatgccatctgcaggggaatatataggcatttggggggccaaacatgccctgcctgggcgtgtttgaacacgcctnnnnnnnnnnnnnnnnnnnnnnnnnnnnnnnnnnnnnnnnnnnnnnnnnnnnnnnnnnnnnnnnnnnnnnnnnnnnnnnnnnnnnnnnnnnnnnnnnnnnnnnnnnnnnnnnnnnnnnnnnnnnnnnnnnnnnnnnnnnnnnnnnnnnnnnnnnnnnnnnnnnnnnnnnnnnnnnnnnnnnnnnnnnnnnnnnnnnnnnnnnnnnnnnnnnnnnnnnnnnnnnnnnnnnnnnnnnnnnnnnnnnnnnnnnnnnnnnnnnnnnnnnnnnnnnnnnnnnnnnnnnnnnnnnnnnnnnnnnnnnnnnnnnnnnnnnnnnnnnnnnnnnnnnnnnnnnnnnnnnnnnnnnnnnnnnnnnnnnnnnnnnnnnnnnnnnnnnnnnnnnnnnnnnnnnnnnnnnnnnnnnnnnnnnnnnnnnnnnnnnnnnnnnnnnnnnnnnnnnnnnnnnnnnnnnnnnnnnnnnnnnnnnnnnnnnnnnnnnnnnnnnnnnnnnnnnnnnnnnnnnnnnnnnnnnnnnnnnnnnnnnnnnnnnnnnnnnnnnnnnnnnnnnnnnnnnnnnnnnnnnnnnnnnnnnnnnnnnnnnnnnnnnnnnnnnnnnnnnnnnnnnnnnnnnnnnnnnnnnnnnnnnnnnnnnnnnnnnnnnnnnnnnnnnnnnnnnnnnnnnnnnnnnnnnnnnnnnnnnnnnnnnnnnnnnnnnnnnnnnnnnnnnnnnnnnnnnnnnnnnnnnnnnnnnnnnnnnnnnnnnnnnnnnnnnnnnnnnnnnnnnnnnnnnnnnnnnnnnnnnnnnnnnnnnnnnnnnnnnnnnnnnnnnnnnnnnnnnnnnnnnnnnnnnnnnnnnnnnnnnnnnnnnnnnnnnnnnnnnnnnnnnnnnnnnnnnnnnnnnnnnnnnnnnnnnnnnnnnnnnnnnnnnnnnnnnnnnnnnnnnnnnnnnnnnnnnnnnnnnnnnnnnnnnnnnnnnnnnnnnnnnnnnnnnnnnnnnnnnnnnnnnnnnnnnnnnnnnnnnnnnnnnnnnnnnnnnnnnnnnnnnnnnnnnnnnnnnnnnnnnnnnnnnnnnnnnnnnnnnnnnnnnnnnnnnnnnnnnnnnnnnnnnnnnnnnnnnnnnnnnnnnnnnnnnnnnnnnnnnnnnnnnnnnnnnnnnnnnnnnnnnnnnnnnnnnnnnnnnnnnnnnnnnnnnnnnnnnnnnnnnnnnnnnnnnnnnnnnnnnnnnnnnnnnnnnnnnnnnnnnnnnnnnnnnnnnnnnnnnnnnnnnnnnnnnnnnnnnnnnnnnnnnnnnnnnnnnnnnnnnnnnnnnnnnnnnnnnnnnnnnnnnnnnnnnnnnnnnnnnnnnnnnnnnnnnnnnnnnnnnnnnnnnnnnnnnnnnnnnnnnnnnnnnnnnnnnnnnnnnnnnnnnnnnnnnnnnnnnnnnnnnnnnnnnnnnnnnnnnnnnnnnnnnnnnnnnnnnnnnnnnnnnnnnnnnnnnnnnnnnnnnnnnnnnnnnnnnnnnnnnnnnnnnnnnnnnnnnnnnnnnnnnnnnnnnnnnnnnnnnnnnnnnnnnnnnnnnnnnnnnnnnnnnnnnnnnnnnnnnnnnnnnnnnnnnnnnnnnnnnnnnnnnnnnnnnnnnnnnnnnnnnnnnnnnnnnnnnnnnnnnnnnnnnnnnnnnnnnnnnnnnnnnnnnnnnnnnnnnnnnnnnnnnnnnnnnnnnnnnnnnnnnnnnnnnnnnnnnnnnnnnnnnnnnnnnnnnnnnnnnnnnnnnnnnnnnnnnnnnnnnnnnnnnnnnnnnnnnnnnnnnnnnnnnnnnnnnnnnnnnnnnnnnnnnnnnnnnnnnnnnnnnnnnnnnnnnnnnnnnnnnnnnnnnnnnnnnnnnnnnnnnnnnnnnnnnnnnnnnnnnnnnnnnnnnnnnnnnnnnnnnnnnnnnnnnnnnnnnnnnnnnnnnnnnnnnnnnnnnnnnnnnnnnnnnnnnnnnnnnnnnnnnnnnnnnnnnnnnnnnnnnnnnnnnnnnnnnnnnnnnnnnnnnnnnnnnnnnnnnnnnnnnnnnnnnnnnnnnnnnnnnnnnnnnnnnnnnnnnnnnnnnnnnnnnnnnnnnnnnnnnnnnnnnnnnnnnnnnnnnnnnnnnnnnnnnnnnnnnnnnnnnnnnnnnnnnnnnnnnnnnnnnnnnnnnnnnnnnnnnnnnnnnnnnnnnnnnnnnnnnnnnnnnnnnnnnnnnnnnnnnnnnnnnnnnnnnnnnnnnnnnnnnnnnnnnnnnnnnnnnnnnnnnnnnnnnnnnnnnnnnnnnnnnnnnnnnnnnnnnnnnnnnnnnnnnnnnnnnnnnnnnnnnnnnnnnnnnnnnnnnnnnnnnnnnnnnnnnnnnnnnnnnnnnnnnnnnnnnnnnnnnnnnnnnnnnnnnnnnnnnnnnnnnnnnnnnnnnnnnnnnnnnnnnnnnnnnnnnnnnnnnnnnnnnnnnnnnnnnnnnnnnnnnnnnnnnnnnnnnnnnnnnnnnnnnnnnnnnnnnnnnnnnnnnnnnnnnnnnnnnnnnnnnnnnnnnnnnnnnnnnnnnnnnnnnnnnnnnnnnnnnnnnnnnnnnnnnnnnnnnnnnnnnnnnnnnnnnnnnnnnnnnnnnnnnnnnnnnnnnnnnnnnnnnnnnnnnnnnnnnnnnnnnnnnnnnnnnnnnnnnnnnnnnnnnnnnnnnnnnnnnnnnnnnnnnnnnnnnnnnnnnnnnnnnnnnnnnnnnnnnnnnnnnnnnnnnnnnnnnnnnnnnnnnnnnnnnnnnnnnnnnnnnnnnnnnnnnnnnnnnnnnnnnnnnnnnnnnnnnnnnnnnnnnnnnnnnnnnnnnnnnnnnnnnnnnnnnnnnnnnnnnnnnnnnnnnnnnnnnnnnnnnnnnnnnnnnnnnnnnnnnnnnnnnnnnnnnnnnnnnnnnnnnnnnnnnnnnnnnnnnnnnnnnnnnnnnnnnnnnnnnnnnnnnnnnnnnnnnnnnnnnnnnnnnnnnnnnnnnnnnnnnnnnnnnnnnnnnnnnnnnnnnnnnnnnnnnnnnnnnnnnnnnnnnnnnnnnnnnnnnnnnnnnnnnnnnnnnnnnnnnnnnnnnnnnnnnnnnnnnnnnnnnnnnnnnnnnnnnnnnnnnnnnnnnnnnnnnnnnnnnnnnnnnnnnnnnnnnnnnnnnnnnnnnnnnnnnnnnnnnnnnnnnnnnnnnnnnnnnnnnnnnnnnnnnnnnnnnnnnnnnnnnnnnnnnnnnnnnnnnnnnnnnnnnnnnnnnnnnnnnnnnnnnnnnnnnnnnnnnnnnnnnnnnnnnnnnnnnnnnnnnnnnnnnnnnnnnnnnnnnnnnnnnnnnnnnnnnnnnnnnnnnnnnnnnnnnnnnnnnnnnnnnnnnnnnnnnnnnnnnnnnnnnnnnnnnnnnnnnnnnnnnnnnnnnnnnnnnnnnnnnnnnnnnnnnnnnnnnnnnnnnnnnnnnnnnnnnnnnnnnnnnnnnnnnnnnnnnnnnnnnnnnnnnnnnnnnnnnnnnnnnnnnnnnnnnnnnnnnnnnnnnnnnnnnnnnnnnnnnnnnnnnnnnnnnnnnnnnnnnnnnnnnnnnnnnnnnnnnnnnnnnnnnnnnnnnnnnnnnnnnnnnnnnnnnnnnnnnnnnnnnnnnnnnnnnnnnnnnnnnnnnnnnnnnnnnnnnnnnnnnnnnnnnnnnnnnnnnnnnnnnnnnnnnnnnnnnnnnnnnnnnnnnnnnnnnnnnnnnnnnnnnnnnnnnnnnnnnnnnnnnnnnnnnnnnnnnnnnnnnnnnnnnnnnnnnnnnnnnnnnnnnnnnnnnnnnnnnnnnnnnnnnnnnnnnnnnnnnnnnnnnnnnnnnnnnnnnnnnnnnnnnnnnnnnnnnnnnnnnnnnnnnnnnnnnnnnnnnnnnnnnnnnnnnnnnnnnnnnnnnnnnnnnnnnnnnnnnnnnnnnnnnnnnnnnnnnnnnnnnnnnnnnnnnnnnnnnnnnnnnnnnnnnnnnnnnnnnnnnnnnnnnnnnnnnnnnnnnnnnnnnnnnnnnnnnnnnnnnnnnnnnnnnnnnnnnnnnnnnnnnnnnnnnnnnnnnnnnnnnnnnnnnnnnnnnnnnnnnnnnnnnnnnnnnnnnnnnnnnnnnnnnnnnnnnnnnnnnnnnnnnnnnnnnnnnnnnnnnnnnnnnnnnnnnnnnnnnnnnnnnnnnnnnnnnnnnnnnnnnnnnnnnnnnnnnnnnnnnnnnnnnnnnnnnnnnnnnnnnnnnnnnnnnnnnnnnnnnnnnnnnnnnnnnnnnnnnnnnnnnnnnnnnnnnnnnnnnnnnnnnnnnnnnnnnnnnnnnnnnnnnnnnnnnnnnnnnnnnnnnnnnnnnnnnnnnnnnnnnnnnnnnnnnnnnnnnnnnnnnnnnnnnnnnnnnnnnnnnnnnnnnnnnnnnnnnnnnnnnnnnnnnnnnnnnnnnnnnnnnnnnnnnnnnnnnnnnnnnnnnnnnnnnnnnnnnnnnnnnnnnnnnnnnnnnnnnnnnnnnnnnnnnnnnnnnnnnnnnnnnnnnnnnnnnnnnnnnnnnnnnnnnnnnnnnnnnnnnnnnnnnnnnnnnnnnnnnnnnnnnnnnnnnnnnnnnnnnnnnnnnnnnnnnnnnnnnnnnnnnnnnnnnnnnnnnnnnnnnnnnnnnnnnnnnnnnnnnnnnnnnnnnnnnnnnnnnnnnnnnnnnnnnnnnnnnnnnnnnnnnnnnnnnnnnnnnnnnnnnnnnnnnnnnnnnnnnnnnnnnnnnnnnnnnnnnnnnnnnnnnnnnnnnnnnnnnnnnnnnnnnnnnnnnnnnnnnnnnnnnnnnnnnnnnnnnnnnnnnnnnnnnnnnnnnnnnnnnnnnnnnnnnnnnnnnnnnnnnnnnnnnnnnnnnnnnnnnnnnnnnnnnnnnnnnnnnnnnnnnnnnnnnnnnnnnnnnnnnnnnnnnnnnnnnnnnnnnnnnnnnnnnnnnnnnnnnnnnnnnnnnnnnnnnnnnnnnnnnnnnnnnnnnnnnnnnnnnnnnnnnnnnnnnnnnnnnnnnnnnnnnnnnnnnnnnnnnnnnnnnnnnnnnnnnnnnnnnnnnnnnnnnnnnnnnnnnnnnnnnnnnnnnnnnnnnnnnnnnnnnnnnnnnnnnnnnnnnnnnnnnnnnnnnnnnnnnnnnnnnnnnnnnnnnnnnnnnnnnnnnnnnnnnnnnnnnnnnnnnnnnnnnnnnnnnnnnnnnnnnnnnnnnnnnnnnnnnnnnnnnnnnnnnnnnnnnnnnnnnnnnnnnnnnnnnnnnnnnnnnnnnnnnnnnnnnnnnnnnnnnnnnnnnnnnnnnnnnnnnnnnnnnnnnnnnnnnnnnnnnnnnnnnnnnnnnnnnnnnnnnnnnnnnnnnnnnnnnnnnnnnnnnnnnnnnnnnnnnnnnnnnnnnnnnnnnnnnnnnnnnnnnnnnnnnnnnnnnnnnnnnnnnnnnnnnnnnnnnnnnnnnnnnnnnnnnnnnnnnnnnnnnnnnnnnnnnnnnnnnnnnnnnnnnnnnnnnnnnnnnnnnnnnnnnnnnnnnnnnnnnnnnnnnnnnnnnnnnnnnnnnnnnnnnnnnnnnnnnnnnnnnnnnnnnnnnnnnnnnnnnnnnnnnnnnnnnnnnnnnnnnnnnnnnnnnnnnnnnnnnnnnnnnnnnnnnnnnnnnnnnnnnnnnnnnnnnnnnnnnnnnnnnnnnnnnnnnnnnnnnnnnnnnnnnnnnnnnnnnnnnnnnnnnnnnnnnnnnnnnnnnnnnnnnnnnnnnnnnnnnnnnnnnnnnnnnnnnnnnnnnnnnnnnnnnnnnnnnnnnnnnnnnnnnnnnnnnnnnnnnnnnnnnnnnnnnnnnnnnnnnnnnnnnnnnnnnnnnnnnnnnnnnnnnnnnnnnnnnnnnnnnnnnnnnnnnnnnnnnnnnnnnnnnnnnnnnnnnnnnnnnnnnnnnnnnnnnnnnnnnnnnnnnnnnnnnnnnnnnnnnnnnnnnnnnnnnnnnnnnnnnnnnnnnnnnnnnnnnnnnnnnnnnnnnnnnnnnnnnnnnnnnnnnnnnnnnnnnnnnnnnnnnnnnnnnnnnnnnnnnnnnnnnnnnnnnnnnnnnnnnnnnnnnnnnnnnnnnnnnnnnnnnnnnnnnnnnnnnnnnnnnnnnnnnnnnnnnnnnnnnnnnnnnnnnnnnnnnnnnnnnnnnnnnnnnnnnnnnnnnnnnnnnnnnnnnnnnnnnnnnnnnnnnnnnnnnnnnnnnnnnnnnnnnnnnnnnnnnnnnnnnnnnnnnnnnnnnnnnnnnnnnnnnnnnnnnnnnnnnnnnnnnnnnnnnnnnnnnnnnnnnnnnnnnnnnnnnnnnnnnnnnnnnnnnnnnnnnnnnnnnnnnnnnnnnnnnnnnnnnnnnnnnnnnnnnnnnnnnnnnnnnnnnnnnnnnnnnnnnnnnnnnnnnnnnnnnnnnnnnnnnnnnnnnnnnnnnnnnnnnnnnnnnnnnnnnnnnnnnnnnnnnnnnnnnnnnnnnnnnnnnnnnnnnnnnnnnnnnnnnnnnnnnnnnnnnnnnnnnnnnnnnnnnnnnnnnnnnnnnnnnnnnnnnnnnnnnnnnnnnnnnnnnnnnnnnnnnnnnnnnnnnnnnnnnnnnnnnnnnnnnnnnnnnnnnnnnnnnnnnnnnnnnnnnnnnnnnnnnnnnnnnnnnnnnnnnnnnnnnnnnnnnnnnnnnnnnnnnnnnnnnnnnnnnnnnnnnnnnnnnnnnnnnnnnnnnnnnnnnnnnnnnnnnnnnnnnnnnnnnnnnnnnnnnnnnnnnnnnnnnnnnnnnnnnnnnnnnnnnnnnnnnnnnnnnnnnnnnnnnnnnnnnnnnnnnnnnnnnnnnnnnnnnnnnnnnnnnnnnnnnnnnnnnnnnnnnnnnnnnnnnnnnnnnnnnnnnnnnnnnnnnnnnnnnnnnnnnnnnnnnnnnnnnnnnnnnnnnnnnnnnnnnnnnnnnnnnnnnnnnnnnnnnnnnnnnnnnnnnnnnnnnnnnnnnnnnnnnnnnnnnnnnnnnnnnnnnnnnnnnnnnnnnnnnnnnnnnnnnnnnnnnnnnnnnnnnnnnnnnnnnnnnnnnnnnnnnnnnnnnnnnnnnnnnnnnnaattgtaaacaacaacaacatataatcacacataccgatgaccgaaatgccagtccggctgtgtaggcagcggaataggtggagcaattggggggaatctgagccacgcccacacctggagaagcatatgacacccaccgatgtcactcctgtctgggtctgtacactcacacatttgtctgaacaaatgtgaaaggacagctgagccccagctatatcggccgatgtccacaaaatcccctgcaagcaacgacatatatcgtgctgcgaccatgctacctcccgatctgtcgcacagcaaccatgatccgataagtcgtgcaatgtgggcctttgtgaaccgcgtcatgtgaacaggctcggggaccacctcaccccagtgcgcaaaatgtctatcaaagtaagacagacgcaaatatccacctctaagctcggtatcctcaggttcgtgaccaaacacctcctcaatgacggtctcccactcgtcaaccgtcactccagtaaccgcatcaccttcggtgggcaatcctagaataccagccacgtcttccaacgtgatggtcatctcaccctgcggcgtgtggaaggtgtgagtctctggtctccatcgttcaaccagagcactgataagcgcagaatccatctgaaatacataaaaattattaaataattatcaaattaagcaggcttaactcatttcataattgcgtggttgtgtacctggagatttcgcatgcgtgcgacattaagaaacccagctgcgcgcaacatgtcagatacaacatcgggtatctggtccgcatctggtccacctttcacggtaccacgtcgagtcttcagtactcgaggtgtgctgcccccgttccacacaacttgtgaaacgtgtgtgcgctgaatacgccttcgcagaacgccccacttgtatggggttggaacaacatatcgcgtgggatccatgggctcagcctcaggatcggatgcagatcgcgacgatgtagacgatgaatcagccatctattcaatatattcatgtacaaaaatttaaaaccacatcaaacaaaatactaacgtcaaagactttaattggaaaactaattactcaatattattagtcaannnnnnnnnnnnnnnnnnnnnnnnnnnnnnnnnnnnnnnnnnnnnnnnnnnnnnnnnnnnnnnnnnnnnnnnnnnnnnnnnnnnnnnnnnnnnnnnnnnnnnnnnnnnnnnnnnnnnnnnnnnnnnnnnnnnnnnnnnnnnnnnnnnnnnnnnnnnnnnnnnnnnnnnnnnnnnnnnnnnnnnnnnnnnnnnnnnnnnnnnnnnnnnnnnnnnnnnnnnnnnnnnnnnnnnnnnnnnnnnnnnnnnnnnnnnnnnnnnnnnnnnnnnnnnnnnnnnnnnnnnnnnnnnnnnnnnnnnnnnnnnnnnnnnnnnnnnnnnnnnnnnnnnnnnnnnnnnnnnnnnnnnnnnnnnnnnnnnnnnnnnnnnnnnnnnnnnnnnnnnnnnnnnnnnnnnnnnnnnnnnnnnnnnnnnnnnnnnnnnnnnnnnnnnnnnnnnnnnnnnnnnnnnnnnnnnnnnnnnnnnnnnnnnnnnnnnnnnnnnnnnnnnnnnnnnnnnnnnnnnnnnnnnnnnnnnnnnnnnnnnnnnnnnnnnnnnnnnnnnnnnnnnnnnnnnnnnnnnnnnnnnnnnnnnnnnnnnnnnnnnnnnnnnnnnnnnnnnnnnnnnnnnnnnnnnnnnnnnnnnnnnnnnnnnnnnnnnnnnnnnnnnnnnnnnnnnnnnnnnnnnnnnnnnnnnnnnnnnnnnnnnnnnnnnnnnnnnnnnnnnnnnnnnnnnnnnnnnnnnnnnnnnnnnnnnnnnnnnnnnnnnnnnnnnnnnnnnnnnnnnnnnnnnnnnnnnnnnnnnnnnnnnnnnnnnnnnnnnnnnnnnnnnnnnnnnnnnnnnnnnnnnnnnnnnnnnnnnnnnnnnnnnnnnnnnnnnnnnnnnnnnnnnnnnnnnnnnnnnnnnnnnnnnnnnnnnnnnnnnnnnnnnnnnnnnnnnnnnnnnnnnnnnnnnnnnnnnnnnnnnnnnnnnnnnnnnnnnnnnnnnnnnnnnnnnnnnnnnnnnnnnnnnnnnnnnnnnnnnnnnnnnnnnnnnnnnnnnnnnnnnnnnnnnnnnnnnnnnnnnnnnnnnnnnnnnnnnnnnnnnnnnnnnnnnnnnnnnnnnnnnnnnnnnnnnnnnnnnnnnnnnnnnnnnnnnnnnnnnnnnnnnnnnnnnnnnnnnnnnnnnnnnnnnnnnnnnnnnnnnnnnnnnnnnnnnnnaggcgcgaaatggcaaatgtctctttcaatggggattatataggcatttgggctgtcaaacacgccctgcctgggcgtgtttgaacacgcctagctagggcgtgttcaaacacgcccaggcagggcgtgtttgacagccccaaatccctaaataaaccccagacaacccccttttgctaaataaataattaaataatattatttttaaatttttgccgaatttaatggtaataagtaaaataattctatattatcatcaaattataaatcattgttgtatgaattttaaaatatttatcacatataattaattgtgattgaataattgtgtaaaactattttattctatcaatgcataatttattttttataagataataattttatcattatcaatatttgttaggataatgctgatgaaaactacttctaaatctctatttttctttaaaaagtataatttatctttaatttaaattacataatgtttaagttgaaataattaattttaaactttaagttcatcttggacaatgtataatataattctgatgttgttcggttagttctaaaggagataagcaattatgtacctactaccttgtgattctcagggaatgagttgggctttttacagtggtcgatcttctgtattccacttctaagaattctctcactcaaattagtatagaataatgtgtaccttccaaagactaattttagaatttttatacccttttttgtctttattttattttttgataaaaccctttttttttctttactcttaggcactaataagaagtcattgaatctttattagaccataaaataaaatataacagaacagatgtaatagctgtataaaaaaagttatactgtcatccagagatttattgttatattatatattcatcttatatagttggtcgcataggcaatttcattagtactagtgagaaatgttttatatgggcagtaaatcaaattatattataaaaactattgtactttacttatttaaatattatattatattttaagaatgccaaacacaattttatttgaatttgatgtctatatatatatagacaattttacattattatccgatcataaatatcatcaatttaattatttaaaataattattttaaaaattaataaatttatcatatataataaattataataaatgactctttacatatcagtgtttaaccnnnnnnnnnnnnnnnnnnnnnnnnnnnnnnnnnnnnnnnnnnnnnnnnnnnnnnnnnnnnnnnnnnnnnnnnnnnnnnnnnnnnnnnnnnnnnnnnnnnnnnnnnnnnnnnnnnnnnnnnnnnnnnnnnnnnnnnnnnnnnnnnnnnnnnnnnnnnnnnnnnnnnnnnnnnnnnnnnnnnnnnnnnnnnnnnnnnnnacaatcaattttataaaattaaggctataattgaaaatgtctttaaattagtttttaattttttattgtctaaaaaactcatttgatttgttggataaatatatttttttagtaagttttcagtaatttctatcatttttttaaaatactaattgaagcaatatttttttaaaacactaacttctaacttttatattttcttctcttttattcttaatatatttatcactacttatcttttcttttttaaataaatcaaggttttattattttttttactcattcatacatttggcatataagagttcatttatttctttttttcctccaacatgtatactaacatttttttctccaaataatgatattacatttttaatttaataattatactattttttttattnnnnnnnnnnttggcatatgagggttcatctatttctttttttcctccaatatgtatactaaaattttttctccaaataatgatattacatttttaattaatttaataattatactatttttttatcaacttagcattataaaccaaaatattgataatgatatatgatagatttattttttttgttattatattttacattttttatgttacattatttattttaatcattgtatcacttataatattaatttattatttcaacattatgtattatctattttgttttgaaaatttttatattagatgattaactttaattattacactaattaacataataaaagtataatatctactcaactgtattttcttacattattttaaacttgattaaaaatattttaaaaaagagtataagattaattatagagtatttaacatgaaaaaaatgtaacataaaatagtagaatataaatatgtgtatttatgtcatattatatttttcagctactttaacggttaattttatcaaatacttataatttaataaattagtttttcaactttaaaatttttaacttccaattaacttttaaacttgttttctcaaacataaattaatctaaacgtatgtgtataatttaagtattaaataaaactgttaaaagaaaataatagtgtcaagtcattaatccattctttctcgcacaatgtgatgacatgtttgcaatttctccaaacatcataagcatttcaatttgacgaattcatgtcacttgcaggtacaaatttgctcaggttactgtttaagttacaaacaaattcactaaaacaagtacttaagcagcattaaaattcagtaaaacaatttcaataactttctaaatgaaatcatatatatttcagaattaaaacacaataagcctttcaatttatttggcacacttttaacatccatcatagaaatcataaagtttccctaatactttacattttccttttctttattacaactgtgacacaacatagaaactccattctaattatataaagtagcagtctactaattctacatatatagaacactagctagcaacaaaggatgcaatgcatgcattaacatatgctagttgaatgatcacgcgggagcaacttcaactacttgttttccaaattaagttacttattctcaagtccttcaacaatgtaacatacacaactttcttttctcaaatgtaaggcagcacagtctctaacacattgggatacagattatggtgatctcgatgtgtaaatccttttatgcttagtttcttgaatgtaatatgcatcaaattctgcacacgatttaattgtgtcttcgggtgagagagagcaactcattattttgagaaattaatatcccactaatcgactggaatattaatttgagaaacaaaataaataaataaactccgcttaggcaccaagaaagtctagtttaatggaccgaataatgtacgtaaattattataaatattttaatatttattttttatttctatggataaaaaaatcccttaggcattcatggcttatggaatggcaaaatttgtttgtactaagtgctggccacggtggctgagtgtgttctgtaacatatattgtcaaagttgaaaagaaaaatcacaaaataaactatcaatactaatcttgtgtttaatcttattacacaagtggttatttaattacataaaagatttttttatactgatttacataaaagattatgcagtgattaatcttcaaatattaagtattgagcgattgaccgttcttaattaaaaacatgtacactaactttagtatataaaaaaatgaggaattgctgctgctgtcaatagttcttttcatttaattaaaaaataacagaagaattgttagttaaacagaaatgcatatggtgtgccgcaatattcatgacaagttaagagaaaactgaatataattcgtgtatacagaagttcccatgtaaaattgcacaaactggttttggatgaagtgggataagagtttcaattttatttgattttgataactacaaagttcaaaatcaacattgaaaatagaatcggaggtttaattttacttgaatttttcttacacgtacaacaaaatgaatgaaaataacattaacactcccgtctcccagaataacaaaggaggttcacttatatactttatattgaacaggctaagtgatttataagagaattaattcaaccatttctcaaagttgcaagccctcgcgaagttttattttgagggacttgaaaagctgaatatgccgaaaactcatcagcttgtgagtaacttttcaagccaatttaacgggttcaattctccatatatctctagcatattcatgaatagtccggtcactgctgaatttgtatgaaccagctgtgttcaagattgacatttttgtccatctctgcatccacatcattcaaattctaaatcaatacatgagccacatgacatggttgatatatttttttttatcgacaaatgttagttgttagaatgttttagtttttgtaatgcaacaaaaaaaaatgttagtattagttagcagaataaattgtaatttagaaatgtgtcaaatgaagaagagtgttacatatatattctctaacatattatttgtaacacagactctattgttggttaaagtttattaaaaactactaaattagaaaaaagactcgttaaataaaatgtgagacccccaaaagtttatgacttcgaataaatttcggccaacaattgagtgttttagagtgtgtactgctaggatttctcatcaaatgagtattatttcatttatcatgtggattagaaattcaggctaatagacttggacatttgcaggtgttgttttctccatgaaaggtgctccactcaagcattaaatttgaaaggaaagttcatatgaaaatttatgttttgttcctgagcagatagatagcacttactttttgatcacgataagccttgtcaacttcttcttggcactccaagtagctagggaagtccttgccaacaaggaaataatcagcacgaccatagccttcattcccctccaaggacccaatcaattcttcgtaattgtaagggccaaaaacaccacttcttacatatgccttcacttcttcaaaccgtggatctggtacaaactgcacagattttggaatagaccatacaacattgagattatgataattccactggtttggaccaaaataataatgtccttaaggatctatacaagccgaattttattaaattttcaattgttagattatactccctccatccttatttataagacgttaactaatttacacttattaagaaattggttaaatttagacattaaatttatctgttagtataatatttttccaaatttgtctttaatattattgggagcatattcatcttctccaatctttataggagagagaaagagacaattcaagacactttagtaaagaaataattaatgcacaataaactttaaatgaaatattataaaaaggaacaacaaaattgcgaaactatgttttataaatagagacggagggagtatatattttgttgtttgaaaccataccaatacactattttgaaatgcatcatgaataagaagaacatgaggcctcctgaacttgttcaagctttttagagccaatgcttatgaaagaaaaacatgaaaggaaaattaaagaaagaattgaatgatgaatcatgtattcttgtttcttttcaaatttacctttccctcaactctttctttccgtagcccggcaatttctttggctcgtgcaccaaaaagaaagaagttatcttctccaacctcttctcttatttcaacattagctccatcaagagttccaataactatgcatccattcattgcaaatttcatgttgcttgttccactggcttccatcccagccgtgctaaacacagagagaaatgtcagaaacaaacactgataacattgattataatgtcagccatataaaatgaattcaaattttcaaattaggatttacaagaatacaaaaccaaccaatttgattgtacaccttaaaatatttttaaataaaatgtttgctaattaatgaaagtacctgatgtgctgggacaactcactgccaggaattagcatttcagcaacactgacattataatcaggaacaaatacaacctacagattaaaaccaactaagattagccttacttcttagaaagaagaggttagtttaacaccctttgccttaattattttagcttttccttgtagacttggagtaaccaacaacctaaaaattattggccaacatcctatacttgtggttttgtagaggtgggattgctgtatacatattatcagtctgaagtatcagcatgttgttaattacctttgtccatatttgtatgggaaatttaattatttaacttaatgattcttgtaatattatttagacttgacccaaatccttgggacaataaagtaaatagattttatttttggttaaggaaatgatcctggaaataagcaatttccagaatgccatttaagaaaaagaaaatagatttttatttaaccatcattaggcacatgaaaccaaaatattgaatgactattatggacgtcacactatgtttagatatttatcccccaagttgaaaaccataccttcaaaagatctccaatctctggatcactgttgattgtagctcctacatctgtgatgaattttactatcctcttggcttgaacatatgttgcaaatgcttttcccccaaaaatacaaactcgaggtacaaacatttctttcctttcctcagcactcaattctttcatctttttgtagcgataaacaattcccaagatattcagtaactgtcgtttgtattcgtgaatgcgcttcacctgaaaatgaatacattagatctttctctaaccattaattgagtgcggaaaaaacatgctattggaattttaattgttatccgattttcccaagtaggattttatgctaagaggtcttttgtattgagctgacagagattggattttgatgtgtatgtgatttattttattttgttaataatcaatctcctgtgtatttgtgaagaaaacatgacatacaccaaaatcattacatttagccaataaaaaatagaatcacagcaaactgaatccatgttgttagactaactttaaagcaaaatttagatggctaattgcaacactgttaaactatgtaataatctctcacaaaaggttgatgttattttccagcacaggacatttaagctaataatacagggttgagtcccttctcttatgcgtcaaataatgagaccctatcaaattaaatgagtttctatgacaacagagacgaagatgactgagtctgtgatccttattgcccaaccgttgcaaggaatactaaatctatacaactatcaaaggcaaacacctttatgaattatgcatgctcgagttgttttagattattagagaagaagagtagaattacccccttttctgtttaactactgttagttatgttatttgtgttagttaactaaactaaccttaggttagttgacagttactactgttagttgtaacagctgcttagctctagtataaatactagagatgtaactactttcagttgagttagttaatatcaaaactccattcctgaagtttgggttttctctcctttttcatttctgaaatccttttatagattcattgaagtatcaaggtagaactaagaactaacattcattccttgatcaagatgaaaaaatgcactccagtccttctatagaaatgttaactaaaaaattggaagaaagaaatgaagtggttggtgacagaaaaccaacctgtacatcaaacattgcatttggattgacaacataacccgttttctctttgagaaatgatgcaaccctaatcttgtttcttctttttgcttctatccactctagctgtagatcctcattatctgcaaactgttgaataaaattcattaataaaaaaaatatagaactgttagaatatagaaaaatatcttttcatatcttacgttatcatcttagattagtttccctatttcctcattatctcttaggattagtcaccacatttccttccctcaggattacgattagtataaataagggttggtgttctaggttctttgaagtatgaacttatcaacacattgtttcattctcttatatcagtaagtgttttactctcttttatatcttccacccaatatctaaagtctcataatttgaataagaacaaaaatatcatagagattttgcgtaaaaaaattgtgcactgactaataaatcacctatattgctcgctgccacaataaagttatatatatatatatatatatatatatatatatatatatatatatatatgataagtcatgcaaatattcattatccaactgtggaagctaaatcatgtcacctacaacttatctaattcaaatattattttaaattaatttaccttgcgaagtatagccaatttctcaagatttgtcacccagtcttctgttccaatccacttggttatgattttactaagatcaggattgcagaaacggatccatcttctaggagtcaccccatttgttttattctggaatttctcaggccacaactgtcaaaagttatatgataaagaaatttgatgagcattttattttctggatgtatatacagagatcccaagaaggtaattgtccttgagagcagaaaaagaatctgctggtattattaccttgtaaaattcatcaaaaacttcctcctttacaatctcgctatgaattgcagctaccccatttacagaaaacccaccaacaacacatagattagccatgcgaaccatcattggtagctttggatcaactttgaatttcagttctattttattgctagtatcctcttcaacagatggttcttcattatcttcttgtttctcttctactacttcatcgtcatcatcttcttcttcttctttttcagttgcctttacctcagtatcatcaacatcaatttccttcacaggatcaacagctggagtctcttctgtaatgctaagcagctccatcactgagttaggcaactcgatattttctagtattctcatttttttaagtctttgttggaataagtccagatcatctatcccatactcagaaatgatttcatttatcaactgaatgacaaagcaaacatgcataacattaaataagataagatttcataaataatgacatgtgaatgggcatatgaaccaagaagtcaagaacatgactactgaaaatcaaagccacatatgtttaacattacctcctcatctatcattcgtattatttccatgtgtcgaggaagcaaatcctgaagaagtgtcaaactccatttctctagtgcctccggtagaactgtgtgatttgtgtaagcaaccgttctaatagaagattcaataaaaagatggatcagacaatgtttaaaaatcaaactagtggttacaacttacattggaaagtgaatcaacaaatcactcaatgtgttagaaatgttattattgagaggctgtgaattttgaaaataggaacctagtttatttgtgtaagttggcacattgggaattgggcaatgtagcagatgttaatgtatattaatataatttattacctgttttaataggtttatagctgtattattttataacttgtacatatcctagctgttgagggcgagctctgccacagcggtaaagttgtgtcttggtgacctgttggtcatgggtttgaatccggaaacagcctctttgcatatgcaagggtaaggctgcgtacaatatccctccctcttacctgcgcatagtgtgaagcctccgggtaatggggttacgtggttttttttttttttttttacatatcctagctgttaggaaatctcctataatctctcccctgtatatctcctgtaataggaaatctcctataatccctttcttccttgtataactccagtaatatctcatctccttgaaaggcacatgtcttgctgtctacttaagaaagaaaggccgcagaaggcagacaagtttttccaaaacaaaagctcttgtcatattgtaatatgttttctggtctcttgatattttgacagcagaagcagtcttgttaacaaacttgtatccaaaaactaaaaagaaaactggaaactttagaacaagacaagcttactaacccttacaagtaaataatatttttaaacaccacttctcctaaaagcagcactcccctttaggaagagccctttgggcttaaagcacggactaagtgattttgtcttgtgccgaaattcaacttaattattggaaagaattgaactatgaggctctagtaccattttaggaacaactctactaaaaaagccaaagctattagctgaaatctcaacagtggttttatatcttttaaatataaggtgaatacacagattttgcaaaaaggaagtacctcttagtaatattccaggctttctcccaacttaaacccttgacatccaccaatatcctaattatctcaggaatgcagagagttgggtgagtatcattcatttgcaccaccactttatctgggagagtgtcccaatttactctctttcccgatctcctttcaaagcgtgcaatgatgtcctgaagagaagcagagcatagtgtgtattgttgcttcagtcgcagagtctttccttctattgattcatcaccagggtacagaacgtagcagatctgattgcaatataaaattctaaaaaaataagcatcatttgtgatttatgcagacagtctactgaaataagtgtaactgttaatgcaaagaaactaatctgattattaggagatgaaatggaggtgcaagtacaatttgtaacaagaagaaaataagctcttgttcataccaatagttaaagtattctaaaggttaaaggaaaaaaaaaaaaaaagttccacagaccttctctgcattcttcataacagcatatgctttggcatgatctccagaattataagcttgcaaatcaaattcttctggtgaaactttagtggaccataaccgcaggtttatagtggttctagttttgtatccaggtattggaacatcataagcaacagccaatatattttctcctccaacccactgtttacttccatttggccctgaaataacttctccatagaatttaactggataagagacatcatttctcagaatttcccagggatttcccatctgcatagagacacttcaatcagagaatcaacctaagaactcctaacttactaagatagccttccaaatctcccaaaacagtaataggaaaattatagaacaatgcatgcctaccctaatatgaaaagtgacgtcacgtcgttaactttgaatcgatgcatataaataatacctcaagccagttttcagcaacttccacttgtccatcctttgttatatgttgtttgaataaaccatacttgtatctaagtccgtatccccatgcagggtaattcaaagttgccaaggagtccagaaagcaagaagcaagccgacctaatcccccattcccaagggcagcatctggctcctttggaggatagcacatgaattagcatttaaataagcttcatttaattatcgacagtatgtccataaaactgtcattcctgaagggttatgtggttcttctgcagtttttcttagtcctttagttgtttgtttcaacaaaagataaatcctttttactgctaaacttgattgattgtttcctaacaatgttcttgaaaagaaaatctttgaatgatcttgggaatcaaatatggaactatttttattgacttgagaaagcaaggcttattaatagttattaaagatacagtgggtaataagagctgaaatcctcaagatacagataacacttttgtgaaatggacatagaagcattagtcctaactgataaacaaaaaatatatcacttcatagtttctaacaagagaagaaaatcgtaatatgaataaaccttattagccacatcctctaaatcgtgacccagctttccaagagcctcagcataaggacctgatagctgtaaattcccaattgcatttagcaatgccctacccttcacaattaggaaaaaaaataataattaatattagtaatcctttggaataaaaatgatctgtcacaataaagaaaactcaatatgaacctgtagatactccatagacatataataagcttgcttaacattcatcctttcatagtaatcatttgttgcattccaatttatgatgagggaatcgcgaacactctccgccgttgcaaagaaagccttattgagctcaaacttctctggagaataagggctggtgaactcggcatggaatttgatgcttgaagcaatagatgcagaatctagtacaaattcattgaaagtgtctgcaagtgttattaaagaaagaattattagttagggccttatttacaggaaaaacaaaaacaatgttgagactatattgctaataaatctcatattattagttaaaaaaaaaaaaaacataaagatgggacaaaatctggagcatggtccaagtggacactgctatattggctgtgatattgcttaaaggagttgctagtgtgattaaccaaataaataaacaccgaacatgttcatctaaaatgagattttaccactaattccattaagacacaaagaaacttggttagcacgaaatgactaggagaatggagtaccagcagcacattaattatccagcacccgtcctatatatcttatgatgcatcatcttcaacaaaactataatataatgactataaaaaactttaaaaatatggtgaaatgtcttttttgttctcagtactttggtagtgcatttcatccaccaaacatcaaattgggtagaaaagtgacactaagccactatttgaatcagctattatgtgcattgacagtttaactctatatatgcttgaacatggccatggcctaaaaacaacgatgcactaacaaccaaatagaccaagaatttttttccccaaagtgacactcttacaagactaactgaaaatgaattataaacatgaattttctgaattatatattagaacaaaaagaagtgactgaaagaaatagagtgacaaagtatagaaaatgcaggcaagcaaccttgttcattgagtggttcttccagttcctgcttcttgtcgctggcaacattcttcacgcagaattttcttattgcgcgtctggaatttgactttgtgatgacaaacaactgccaaatattgtttctttggctgaaacctatgaagcttgtttttgaattgtgatgtaaaggtgagttggaatgcctgcaggttgttgagaagggtagagcagccattgctgcaaggttttattcaatcagtgtctcagaggaactaccgaaatagtaacacgcagaacagaaataatatttatgcaatgttgctttgacttgtgaagggagaagaaaagaaaaatgagtgaaagaggaagtgtatatgtgtctctgtgtttgtcttcttatcttcgtttaatatctcattttgaacacgagccaaaatattggggtgtcactatccctattcctttttttgcgacactggttggttggtcctccttcttcctttcatgatcaagaatcatcatgattgaactgcatgtccatgaaactagttaatgaccaaatcacccctctgatattttctgggtttctgccttacacattttgattattttagcaatttttgtccgcatatgatacagcacgctggtttcttgtctgaatatggccacttgcactgaaacgtaatacttctactttcagtgctattggccaataataaacacatgattcgaatttgaatctagaataattacaaaaattgacgagttacgtgtaagaatgacgtttgttcattgaaaccagaggcttgcttgactttgaagagtaacaaccatctctcccttctaagtttatgtataaaaaaggactgacaaaatttaatgatcaaattgggtaattcctattgcgacatcaaagtttgtgtatcaatagtacaatcaaatctaactttttttttctttgttacaatagtatatggtcgcatccgacagatcatattaccttaaataatgtacaatacaagttcctataagaaatgccttaaaagaaataattaagcaagaaaaaaaaatgcatatatacaaagataagtcctcaagtatatgaggtgacagcttaggtgtctttatcaaacaaaaacaagtggaaatctcacaattcaaaaccttcatgccatcttgtttttcttttctgtgaaccttcttgacctacttaacatttggtaaacactaacagtaatatacagttcaagtttcctcggtcttcaccggaatccaattgctctctggcatcaccggagtccaattgctctctagcacctcagacttcttcctcgcacttgtaacgtaaccaaaaacgtaacccatgaatgcaccaagcagcagcacacttcctcccttgacataccaagacaacgtggattccacaatcacatttccagctttacaattagcatcagcaatactacagcttccgtcaccactgacaacttccccagatgccagaatttccaactgatcgtgcacctcaccatcatggtttcccacataagaaagcacgagcttctgctttgtagcgacgagtcttgtgtacccaaactcgcctccgcggtacagagaccatttcggctgtggaaagattggatcatcgggatggtctggccttggttcccagatgggttgccagtcttgccctgccatgccgatcacaatatgaacagtatatccttttttgtctcctgcgttgtgacccgcattaacaccgcaagtgaagttattcagtggacaaaatctctcgtatctatgaacatgaccccaaagggcaagtgtcacattgttattcaccaacagaggttccaagtactcgagcatctttcctcttaaagcagcatccctattttcatggctggtagtgtacatgggcctgtgcccttgcaccaccacaaaaggagtcttgcccctgttaaccgattccaaatcatgcttcaagaagtcgtactgtttgctcccaggaacgaaattggtctccgtggaaatatacacaaagtgtactgctcccatatcaaatgagtaataaagattcctagttggtggggctgcagcatttccagtgagttctgaagagtttccgggcatgttaaaccttaaactgtaaggcacaccacactcaccacccccatcttttccataactggcccaatcaggtttccatggctgcaaaggccagtcatactcatgattgccaatgcaaacatggtatgccacttgggaggcaacaggttcaatctgggcgaaaaaatggtcccacaaccaggaataacctcttgcataactaatgtctccaatgtgcgacacaaaggctggcttgtcgcctagagcttcaacatcacggaggacccacttcatggttgatatgctttcatcctgcgttcgcagaaacgtattgtatggtacagctgttcccatgtcaccaaacaggaaagctattgtttcgtctgaatcactattcctcgacacaaaactttgagttgcactccaacctccgttatcatttccaacctggtacatattaaattagatttaaacggttgttaatatctcaacatctctccattcataaggtctcactgttttggagcaaagaaacaattttgttccagaaattgattaacagcagacaaattagtcctgacaaaagcaaaattaaaccctgacttgggcattagcaaatatttggatttgggcttaattaaacacttattcaacattcttttatcaaaatgagaacttattcacctgtgtaaccatgaaacttactgacacgttttaataaggtttttaaaatagaacttcgagtttaataggcatgcatggtcaatgtacagtttttacaatgtcaatcaataagaaatcatatataacttttagagaaaatagtatatgcattgagagtgtaaagggtttttacaatgtcaatcaatcagaaattagaaattagaaattgccaggtataataagcttattgaataattacttcaaaattcatgcctagtatgatttcttattggctaataacataaaatttttacagagtcagtatacaaagattaatcaataaactggaagttattataaaagttactagtaataaacctgtcacgcataactgttcatttatgattagatgacgggtaaaaactctctacattactggtgcatttattcttcaatttatatttgtcaatagtgtgaaatgttcttacgcaaacttccatacatcatattaataaacaggaccactaagtaaagtcattaaatcctattgaatacagtatatgtgtacacttatgatgcaataaactctttaaaacaaatcaagagcttattaaaaggtccaaaaccactttcacataaataagccctttcaaatgccagcttgacacacccattagtgccaaatgtggcacctaagcagcatgccactaaatgtaacccacaagacacactagagtagcatagatcagcctcagagccaaaataaacaacactcaggaccatatttttactaacgctgagggactaatttgaaggattgtttcaatacttgaacaactctacagcacgatttctaatagttcaaaaactacttatataaaaagttctcataatttcataagttcttctagtagcttgtatctaaataagcaagggggagtaggtcagtaagttgagagtacacgtgacctgttgtacatcagtaaatctcacggataaataaaattgtatccaaataaaccctaatttcattactttagaagagagaataatacttccaaaaaaatttgatggtttatcccaataacagtaacaggtacaattactaccttgtcattagagagtgtttcaaaaaaaaaaaaaaaaannnnnnnnnnnnnnnnnnnnnnnnnnnnnnnnctctttctttcttaattataagactcagactctttttcaagttaatgtaatattaacaatagccgatgaaaaaaaaaccgttattagttattactaccttgtaataatacctctgtcccttcttcaaacccgtgagaaccgcgtcgtggataaacccagggtccctccacccaatactcgtgttggcaggcgcgtcgcacatgtgttccctctcgtacctctccacacgtgcgaccgcaaccccatcaagcttatcctccctctccccgtacctcacgtaggtctccttcgtatcgcgcgtgacatacatcacgcgcatatcctcctcctcaccaccgcgggtcccaacgaatgcgaggtgaatctgttggggcccacgatgaggggcgaaggagacctcctccgagaacgcgaggaggtggcgcgtgacggggagagggttgtgatcgtggtcctggcgcttggggttgatctcggcgcgggtccagctgaagatgcggaaggagtagttggagcggaggtcgacgagggggagggagaggttgccggagccggtgcgccatgtggcggactgcgagaggaagaggtatccgatgaagttgtcgtgcggggaggtcggaggggaatagatggcgaggaagtcgaggtcggagggggaagggatgccggaccagcggaggttgacggtggcgccggaggctgggagggtggttggcgtggcggtgagggagggtttggattcagcgaagtggaagaagatgatgaataaggagaagaggaaggggagggatagatcgggaatcatggtggtggatttggaagattgaaactatgaattgaatcaattattcattgttgaatcatgaatgtttgattattgattgattcctaatcctagctgtttgtttgataagggtattatgggacgtgaaataaaattattaagagagagagagagagagagaaagagtatcgttttcgcattttaaatggcatattctattcttttgcgtacgcgacactgcggctctcttcttcctgttgaatttcttgagattttttttaccgtctatgtcatacaaaaatgataaaaatctcaataatcaatgggaccaagaagcaagagctagttaaaataaaattaaaatatattttacccctgtctatgtcatacagtaattattttaagtaaatggtttattaatttacatgcaagcaaatagtcacttttattaattcttattgaatattaaaactttataaaaattaaaccaaatcatatatcgtcttgggtcttgacttgctcctcaagttgaattaaatagttgatgaatttgggctccaatccttctaaatgtgaatttgcttcaatcaaagttatcactatttgatttaaggcttctcttactttcttagcctgtatcaatcttgaacccacgaggtgaaatcgttgtctttggtggcgattttgtagttatagtcacactttttgtcaacgtattaagatcgaaattgaagcttgttgctaacaaaccaaagataaatcttgtggtacttgtgttgttgcagaagaaaaagaagcatgctttacccactcataatgagaagttgacgatcaagtttggtctagaccacggaataaaagtttgagaactaagatctctcataaaaaagtttaaagataagaaccataaatttgaaaaattttaagaacaaaaaatatattttaccaaaaagctgttaaaaaatgttgggacaaagagttttttaaaataaaaaatggaacatttttaagtgttgtaatttttttattgtactataggttttattttaatattgtgtattaagtattaaacacaattatgaaaaccagtccagcctaattggtcggaccgagatccgataggctaatcaatccgattttactattcaatcgtttatgcaattgaccccctcaaaatcggtcaaacccggctggtccaaccggccgagttcccttttttttggaacttttttttatcttttatttaaaattttggattattatcaattgttattttgaattttggagtataaataagtttttcttacttaaataatgtcagttatatacttatatataataaatacatatataattttgattttttaatatatactcagttaaaccatgtcaattaatggtccaccggttgaatcagtgacctactgactcactaccttgacaggatgaataatcaagtcaattttaataacactggtattaaatatttaattttaatttttttgtttttggatatattcttaattttagtttaaaattaaatttgatttaataatttgctaaaaaaattcaactatctcaagtcactctcgtttcaacctttttatattttcttaacagtttttttataaataaattcatttaaagaataaagtatgcatagtattatattcttttagagaaaataagtgatgtactaatagttaaaaaataattttatatcgttatttagttataaattattatgtatgtattaatcatgaaaattgtaaaagtattttagataagttctaatccaaataatattttcatgctacattctattaactaattaatttttttatcatgaaacagaattcatatttttattgtaagttttttttttaaaataaataactatagttttcaacttaagaaaatttttatatattgatgaaaataatgatcataatttcaataataatattcattataacagttaaaaatattttgttttagattgtaataacaaactgagattgaaaaatgaaagtaacttttgaaaaagaaatagagattgaaaagttaaaggttgaacgaaaatacagaaaaataaatcaaacaaaaagaaatttaattaaaagtgagacgaatatatatattattatctttgaatcaataatcacatgtgttgtatgaatgatgtatgaagatttaagtgataataattcagtcagaagaaaaatgataattaaatctcttatttctaacattatccatcgaaatccaaatgtgtacaatggtttattaacttcatatctctatcagtgctacttgttacgttgccactacaactgcttccttttgaatttgaaagtctctctggacgtttcaaaattctaaaagcatgtgcataagtgatcatcgaaactaacttttatcgaaagaagccttctcacacaacttagtaaatttccttatttgctttcgaccaactctaatagaaaacatatttcgacaaaattaatataataggcaacccacacgctagttttgacaaaaaatcttcctcgaagtatcctttttctgtcaaaaataactttgtcgaaacatagcacttccaggcttaggaaattttatttaacaaagataacaatagggtaaagtttgttaatttttataataattttttaaaaaatcatataaataataattcatgtaaaattatttgatacatgaccatgaaactaatcttttgtttacataatttcaacaaaaaaattgaaccaacatttgtagaagcaaagcacaactacagtggaatggacccacttaatgtatgtatgcgtgaataaaaaaattttaaaaaaatgatatagtgcgagaaagtacaaaattttctacggcatgcattatatcacaataatttaagggccattttaggagatagaacaaattctaactcttaagtaaacaattacaatagacaatggaatggacacatttctaacttgaagcccaattcacttccacgttactaacatgggtacaccctttcatcatttcatgtcacacaatgacaaaggaatacacagtcagtgttagacaaacacaacaccattggagccaatttcatattctcatggtggggtagcacagtttgctccaccaaagtctttcaattatcacttcaattacaaggatattttattagttcgacttttattcgtttgataaaggaaatcatccaatgttacccaaactagaaactacgctatcttcttaaatcatcccctttttcttgtcttgattgtcgaataattctattatacctcttaatttacttgaaggcttaggtcatcaacaagccataatgcagcataattggatcatactacaatcacaaattgtccatcattttgtcgtattaattggtgaatagtgaccaaatatataatttctataagaaaggaatttttgagaaaatgacggctaaagatttttgtcaacttttttcttctttaaaatgataaaataggaagacacccataatactatctatattaaacaaggtatcaatgacgtattaagattgacaacaaaattttactaatagtgtgtttggattgatattcttaatccataaattatcgttttctgtattgaaaaaagcaaaagacataaaagttgttatttgtagcttttggtttcttcccatctgtatatttcaagtgtgttaccaaacatgcaataagaagattattatacaagccttaatcatgagtatttgtattcccttgcaactatgcaacaagaagcttttaagtgcataaggtagtttctctaaaaaaagggttaccaccaaataagattttagtagcaaaaactgaatccacatccactgaaaaaataagagttaatttcatattttgactattcagatcaacctgtattgacaatttgtttgttacttctttcttccttcccctccgtagaggataaaagaattataatattacaacatgtttttcctacttgaaaatcaaataaaaaaatatttattaatacataattttatcattgtatcaagattcgtccttacttcaaaatcaaataaaatggataaaaattgagtgtgtaaattaaccataaaaaaagtactttaacaatttgtagttttgaaatcaaatcttataagaatgcaattcgtagtttgtggttaaaatttcataggaaaaaaatgttaacctttgtaatcttgttgagtaagaatccaaataaagtgatcgagttaaatctgaaaaataagatgcactgaaaatcaagaaaccagttcaggtatacgtcataaaaacttaaaaagcaaggagtcaaacaaattcctattaatagcagtcattaacaaatgaaaaaactatttcactcgaacaattttagaaatctacatacatatatgtgtgattccccttttattaaccaatcaaatgccatgctttaaacaaccaccaccttcatggtggatctgtatttttaaattacacgttaataaaaattgcttccggttaaacaaactagcgtctctgctaattaaaattattctacctaaaataccattcccctaactctatcttagacacaaatactaataacgattgatacaagcgataatgacttatattctttagttaagtaattcaagattcaaatcttaattgattcttaaatatgaaataaatcgtattaggataggaatatgcactttatgtgcactcaagattctcaataaagatttatcattattttcaacaaaatcaactttataacaatatcataataaataaataaataaatcttaaacacaaacttttaaatttcatataaaacgtattactactactacaaagttgcatatgcccccaaccccaacacttgcatataaactttgtgactcatttgatgagagataacaaaacaccaaaaacacaattaattgggagagttgagagtgaggttcacctaactctatcttaggcacaaatactaataatgattgatacaagtggtagtgacttatgttctttaatcaaatggtccaagatttgaatcctgattgatcattgaatatgaaataaaatgtattggaatatgaatattcactctatgtgcactcaagattttcaacaaggatttatcattattttcaatgaaatcaacttcataacaataccataataaataaataaaatcttaaacacaaacttttaagttccatgtaaaacatattactactactacaaagttgcatatgccccaaccccaacacttgcatacaaactttgtgactcatttgataagagatgacaaaacacccaaaacacaattaattgcgagagttgagatcgagtgagacccactgactctatcttagacacaaatattaataatgattgatacaagtggtagttacttatgttctttaaccaagtgggtcaagattcgaatccttattaatctttagatataaaataaattgtattgggatagaaatatctactttatgtgcactcaagattttcaacaagaatttattattattttcaatgaaatatcataataaataaataaatcttaaacacaaacttttaaattccatgtaaaacgtattactactactacaaagttgcatatgcctccaaccccaacacttgcatataaactttgtgactcatttgataagagatgacaaaacacccaaaacacaattaattgggagagttgagagtgaggcccacctctccctccgtaattccaaagcaattatatcacttcatgtgtctcttgctttgcatttaaacactctcacacacaacacagtgatcacttggctaatgtcaccacaccccacacactcacacaaaccccctctttcttccctctctttttcccatcactttctcaatccctctcatcatctctacaacccaataccacactttactcttcccttcttcttttcttcttgttctttttcttcaacaatgataatgaagacttctctttcttcactcaccaccaccatcatcaccatctttgtctttctttttctcttctttgtttcttcatcaaattgtacacgtcccaccccaccaccacccctttcatctcaaagttcttcaacacttcacaaccattattgtgattctttccccaacgcaaaggcacgttctttgtgcattggccttcaaagaatgcaccaaaactcacttccacttccactcccacaaccccaggttgatccaaggttcggtgcagagaagagaagagttcccactggccccaacccacttcacaactaatttttcttcaaccaattcccaaagccaggttcactactactactcccactactcctataacctatacaccatatatacactaaggtatatctttaatttccacgtacaatttcaatttgacgtcaccccaccctttttaatataggcaaaatcaaaacccatttgttaatttctcttcacatttcataaccatccatcaaccacctttcttggtattattattattcttatgggttggccaatagtactactatctaatcctatacacttttgctcaaacaaccacaacgtaagaagaatgattatacatcaactgctacatagagctaccatggcatgcagaaagacacaatctttggcaatattgcttctcctcctcatcagattagtttcctccatttctttagttcttgacatgttcaatctttttttcttcaatgggtacaatgttaagttgttaaccatgagacgcatgtagaattaactgacacgagttcggccggagaattttgtctcttgtactaatcgtcctatctgattggaacagaattaactccgcgaaagatgtataacattagagattgtcttgatcactagctattacttttgtgttgccctgtagtgtggggcaatgaagtcccccatttccatgcttgtttttggtttttcgatcttgcaagttggtggtacacagacggatagagcatgtgagagttttgttttgtataaagaaagaaaaagagaaaagaaagagatgaatctgaaaacaagcatggaaatggtaagagaatgtggttgggagctgaattgaattggaccccacgagtttcattaatgtggagccaccgaaagagcagggtgtatctatttattatgagtgagtgctgctctgctagagttcttgaggtcagaacgcgctcattcttcgtgccttatcagtcaacgaccatttttatttttattttcaattttaaatatatgatgtatgtattcatgtatagtatagtttggagttgttatttggattgaattaatgaatggatatatatgccacactgtgttgcttttattgccctcatatcatatatttcttgtttgtttaatttggtacgattctttaggtaattcctgttcatgatgttctgagaatgaatttgtggtacggaagttattgctaatgtttaaactttgtgtttattttttttttgtaaatattaaataaattcttttttgggtcagaattcaataaactcttgatacacaaaatttaaacataaactatcgtgtacgtatgtattgaatatcatttcatgaaatgtaaataggtgtttatcatttctagatttgacttcagggattatatagataatgaatatatataataataataagatttaaatatttgtttagttcttacagtattttttatttttcgttcttattataaaagaaaatttagttttcataaattatattttttttcagcttttaagtgtggtataaattgttttttattatttaaaatctatctatattgctttaaatttgttataactgtgtctacggctcaggttttcatcatatgtattttctcctattaggtgtcactggtaccattactattaataatatttttttctcataaaaaaaatccaaactggtttaaagacgaaaaataaaacaaataatttgtaaggagaaaaaaaaaactaaactataagaattaaaaaatattttttcctaacaataataataatatacacatttaaaataattatgaaattgctaaagttttgttggaatagtgcttacagtttgtttgaaaattaaaaaggaagacgatttttgtatttttattaaaaaaatctgatttaatagttgttttagaagaaataaaaaatttaatataaaataaaatgattgttgtgtattctttattgttataaacattatataactattttaattctctgtttcagaacataccttaaacaatggttgttactttatacttaatttattctccaagttgtagtttacgttgtagagaactagagaagttaaatttgttattagacatggcaacggggcggggcgggtgcggatattgtattccccgtccccgcccccgcctttnnnnnnnnnnnnnnnnnnnnnnnnnnnnnnnnnnnnnnnnnnnnnnnnnnnnnnnnnnnnnnnnnnnnnnnnnnnnnnnnnnnnnnnnnnnnnnnnnnnnnnnnnnnnnnnnnnnnnnnnnnnnnnnnnnnnnnnnnnnnnnnnnnnnnnnnnnnnnnnnnnnnnnnnnnnnnnnnnnnnnnnnnnnnnnnnnnnnnnnnnnnnnnnnnnnnnnnnnnnnnnnnnnnnnnnnnnnnnnnnnnnnnnnnnnnnnnnnnnnnnnnnnnnnnnnnnntccaataaattaaatttaagcaatctatttgagtttttagcttatgttaattgatttctataatgtcaaatcataattaaacaattcatatatattttattccaataatatacttttaagtaactcttaaattatctctttaaatgatcttcaaatgacaaaaaaatattttttttaatcaaaagaaatcgttgcttatataaataattaagacttaattttaagcaatctaatatgatacataaatgatctctaattaatgataaaaaaaattaagcaataatatttaaaaataattaactcgttcagtaaccagcatgtctaaagcaataaagaattgcttttgggggtgatttctccataattttatcttcaactagaatttccatcaccaatctaattaaacacactagatacaaaatcttggtaagaagatcgattactttaattataactttaggtaaatttcattttaattataatttcgaattggtttataactacgtagaggggttggtgatatatattagattcgtttctcttgaagaggtccatatcgtatgacatcctctcttttggggctatttgcgtcgtatttggaaacaaaattgataaaagttccaataacgagtatttcaaaaatnnnnnnnnnnnnnnnnnnnnnnnnnnnnnnnnnnnnnnnnnnnnnnnnnnnnnnnnnnnnnnnnnnnnnnnnnnnnnnnnnnnnnnnnnnnnnnnnnnnnnnnnnnnnnnnnnnnnnnnnnnnnnnnnnnnnnnnnnnnnnnnnnnnnnnnnnnnnnnnnnnnnnnnnnnnnnnnnnnnnnnnnnnnnnnnnnnnnnnnnnnnnnnnnnnnnnnnnnnnnnnnnnnnnnggaagcacatgattttaatgaattttcttttcttaaaaaattcttattcattctttttaacttcacaattatttcatgataaaataactaccaaaaagaatgtgtgtaaaatggtttatattaaatttaaactagctaaattaacatttaaagtttaattaaataaatccaagacattatttgtaattattagtattaaaatgactgctgaaaaattttcatgtcattatttaaatataattttcttttgtcttttttttttctttcataaatgatttttttattaaatttaataatgaaagtttcacagaattaacaattgaatattgagttaaaattaaaagtaatgtaaaaaaagagaaaaaggatgaaactataaaaacaaatcatataaatagtgattctaattaactctacaataaannnnnnnnnntggtttatattaaatttaaactagctaaattaacatttaaagtttaattaaataaatccaagacattatttgtaattattagtattaaaatgactgctgaaaaattttcatgtcattatttaaatataattttcttttgtcttttttttttctttcataaatgatttttttattaaatttaataatgaaagtttcacagaattaacaattgaatattgagttaaaattaaaagtaatgtaaaaaaagagaaaaaggatgaaactataaaaacaaatcatataaatagtgattctaattaactctacaataaatgaagcacgtctgtttaatgccgaaagggagctattcttagaaatgtatctattgatgcttctgaaaaaataggattggaccagctatacaataaatgagacaagcttttactcaagttgcaatattaaccatccatccgtttcaattcttctgctgaacaccctcagagaaataagatattgctagtgtaaaagatataatattgttagttaattaaaatttatagtaaaaatatgactttaaattttaaaaacatttacgatatcacaagtgtctctctcaatctattcaatcaaatattaatttcactctcattgcataaagacatagttgtcactagcataaatgaattttgtatattgaagaaattgaacataattttttttttaaatagatcatttcattatgtgtgaacgcaacaagaatttatattattatacgatttctatcatatatgataattataattaaataataatgtgaaaattttttatattcttttttgtctggtgaataattatttatattattaatacataaaatatttaccctaaaataaaatactatttacatgtttagaagataatataagacatcataaagtaatgttttaattcttttcattttaaaaataaaatgaatattttcgtatatagtgagaaaatgttagatttttttaacctttctttttttatatagacaagtatagaagagaacagtattaacaaatatgtagggctttagtttgtttgaatggaaagtaaaaaggaaaatagtagaaggaaaaaaagattttgaattctctgatctcaacctatttaattgggcaaaaaaaccaataaaatacaaaaaaaataaaaaattaccaatatnnnnnnnnnnnnnnnnnnnnnnnnnnnnnaacaagcgaatgattttctcaaattttaagttttcttaaagatagaaagctttcatgtaagtctcacattaattagttttcctttcttttatttaatttgtgtctgcaaccaacgagcaaaaatattgtatgttttccttacttcccatccgtctaatttattctcacatcttattttctcttaaaacatatttttattattacttcagtatttaattataatattattttaattaattcacatcctttaaaaaataattaatcatattaaatcttttgattaattatattatcgtttcaaaattactctttcttatctctttatctaattaattaattttaattaatgtttaaagaaagaacaattatataaggatatataaaaaaattaatgatccaaaagttaaaaaaataatcttataaaagcaacaaataaatttctaaaaaatatcttataattaaagaaaaagggactacttattacaatacaaaacactaattgatcgattcctcctatctatatatgtaacttcaatccattaatttataccaataatgctaagaaaggctactagtattcagtttgtataattttttcaataattatatacccacatcaactttttcaaaaggtaatatactttttttcctgagataatttaaaaacttttatagttaattagaaagctctcgtagcttcaaatttatacaaagttggtataaaaccttgggagcaatcttgtgatctcaattggtcaaaccttagttaatgtgatggaaaagttgccctcatgtatgcatgcattcaagtataggactagctttatgcaagcatcggtaaatgcatttatttgtgggtgcatcaatctcatgcagcagcagtcactttttcattatattttttgtaagaacatagcataaaggtctgcaaccctttctgccctggctgcacatgtgattaccttttaaaaatagagtaatattatttatatatgtttattttattatttttagaaatttatatgcatatttttgtcacttacaaatcttatgcttttatatgcacttatatttgacaattgttcaatcttatttttaaatagagtaatattttgttaaaaaaggagaacgtactatttaatatataaaaaaatgtttataataataaaagagtttaattcaattaattaaatatgatgtataaattattataaatctctgacactattgttaattctcatggataaaaaaatatttacaataataaaaaaatctagctcatttagttaaatatatagatacataaattaatgtaaattccgacactgttttaatttctacgaataaaataaatgtttacaacatataatatatacatactcgtttatttaatttatttttcattatatcatctgtgttactatatcacaaaagagtaatctttcttttttttttctttgtatctctatcatatgtcatagaaaatgaaggagaagtagcagttttcttttgaatatttcacaggcacaactagttatagaacacataaaaacccatcggtctctctctcatgtcatgcatagatcatagatgctaaagtctaaagacatggaatcaattgttattgatactttattccctttggaacttccacatgctaatatgcattgaatgttcaaagggacacaatttatatatttaaagaaaaaacctgacatgtataattctcttttttcttcttcctagaaaattaaaatattttacaaaatttcatatactacgtatgaaaactgtattagaaaatgttgtcaagaaaatcaattaagatcccatgcttaatggtaagtttccaaggaagaaaagaatacctgtcttcccccacaaggcacttaattcgagttccaaaccagacaacacatgcaaagtatatttaaccttgcttgtcctaggtttcttccctttcaaataagcatcaaccactctatgattagttgatatttacaaagcatattgctaaagctagagatcagaaaaatcttatttcttcctgtagaatggaaactttgatgaagcagataaggttagcaattctttctttcaccctatagcactgttggatggtaacatgcatgtatcatttattgtaatttccacaccactcatataatttaggtgaatgaatcattttcattacaataaatgatacatgcacctaaattaccatgtagggttgagctgacaatatagagttattaatgttatcaaggctagtttgcaatatttgaatatcaatcattttgtgaacctagtgtctgatgaagaatatcatacgcttttggcattagtatataactcagaagggttatacattaaattatcttaatgtctgttttacatactctttttcacatattagaggtcttttaactaggtattcttatatgcatacaacaacaataggtgtatattgtatatagcagttttttgttccataaacgttgtctatatacatgctgaaaactttttgccagaacgaaattaactggtgcagaggaggagaataaagctgatctaggtgggagcagggatcagaaagttacaacacggaaaaccccatccttcaaaggtgatgtaattaatttttccattgcagggtttgttagttaattattagtagtaaaaggcaagaaagaatatcatcaggaaagagctgagaatttgggatattgtgccacatctttaacagaatgaaatcaatcacatgtctctgattttgtcctctttacatgtcctccaacaaaaaattaataacaatttaaaaagtaatattctctcttattttttaactgttttaacttgaagggtttttttaattagaacaggaaatgccacatgaaattgggactaggtgatttaataccatctttaactaagttaagggacaaaaaggagggagaaaaaaaataacatattaaagtttatatatatatatatatatatatatataatcttaattacaaccagaaattggtttctggattatgaaagagagtttcttacatcctcagggctcaaagaacttattggctattgtacatttactaagttacatagttgatgtgacaaactatgagtatcattaataattaaacaagaaaagtattgagtaaaaaaagcaatactttataaaatgaaacatacaatttataaaggggagcatataagaacttccaagtgaaattgtgaacactttgatgaggctgttaaaagaattagccaatctgttaattaacaacctctagtgaaaattttctacagataagaaaaaggctcagaattggtttcagagataattttcaagaagcatgagtcatgattatgatgcagaaatggagcatgccacagcagtagctgctgctgcattcgcaattttttcacaagaggtttcacaaactcgacaacaaaagaaaatgagggagaaaactttgcccaggggcaaaagcaagatggatgatccaaaacctccgatttctcagtttggtagcacatcaaggcagttctcaggtaattaaagacatgaacacaaaactaatccaagagttgatatataatggtgtaagacctcgctttgtttatataaggaagaacgatctagtttatggaaaaattggtgtttaatatgtaaaatttccttaaaccaatgacaatcacacatcatgaataaaattaatttctaatctaagaaaaaaaaagacatgaacaagtcataataataaagtaaattacattaacacatcatttttttagattacacaaaatctttctatcttttctatccctattttaatctttttaattgtttaaaaaaattatacagacacctattaacctctttaattatttgaaaaacactacagtgtcttcgatattgctgtaaaagttaaaaaaacgggaaaagtctatgaaatttcacaaaaatcccaaggaatatcagtataatttactttaataatttatagtctcttcgacacaattgacacaattatgatgaattgcatctgcaatgcttcacatgcaggatcatttaaactcccaaatgataaaatgaaccatgctatagtggatccaaagaggcctgaaaagaccatgaccccaccatcaatgaggaggagttcaagttttggtgaaaaggtgaaaagtagcactgatggtaaaaaacctgagatccaagcccgcaaaaggactccaacttttggtgatgaggacttggtccacactggtgaaataaaacctgagaccctacaattaccaagagttcctccaccagttcatcagcaaatgcctttaaagccgccgccacctccgttgccaccatcaccaccgccaccgatcaggcagacttcagcaagaccaggtgccaatgaaacaaaagcagatgcctgggagagggaggagctggagatgatcaaagaaaggtatatatacttatcttatcactattatatgattggaagaaaaatgaaaaaaaatgaaattgacaagaaatatttaaattaaaataatacatgaaagtttgggatctataccaattttttaaaactttctactcatttttctatttttcctcacaaacttaggtttggatattctttgggaaaatcaaatcaaatcaaactgagtcacttttttaataaaaacagtggaacataaataagtttaatccaaaatcaattctaatcaaaattagtttcattgaaaatcaaaattgcaaacattcacctcaacagacacttaaagtagtttctaaatttttaagttcaaaattggttaattggtgtgatttggttcatttggttattttgcacacttccatgcatttatcggttgttttgagtagccattctagcaaagaaccattctcaatcaggacttggataagtgctttctgaatttaaatcacatgtaccctctatatttttgtccctaatacaaaaataacacttcattaaaattaaaattaaaattcaatcacatcatttttcattcatacattgcataatttgtcaggtacgagaagttgctggaaacgatagattcatgggaaaagaggaagaaggcgaaagcaatacgcaagctaaataagcatcaggtgaagttttctccctcaactccacaacatattcatgcttaattaaaattatatgttcaaatgtagtgcttacagtttaattttgacatgtaaatattttaataccataaattaataagaaatttttttaaatctaatttgtatagtgactatcatcaagtttaatgattttagcattcatgtcaattgatataatattatattatttttaataaaactaattgaaaagttagttgaaagttaaaaaactagtttacaattgaaagataatagttgaaaaattaggttattaaatcataagtgttcgataaaattatttgttgaaatagttaaaaagtgtaaaatgacagaaaaataataaaatcataatttatttaaaaaagataataaaaaagtaaataaatatattaaggataaaaataaaaaaatatatataaaaaagatagatgctaaaatataggattttaaaaaacattattttaagtaaagttaaaaagaaaaacgctagaaactattaaaaaaattgtttatccaatagtcaaataaattttttaattagtaaaaaatattagaaactaattgaaatgtattgtctacataatcttagatgatagctagtattttaaaaaaattctattgttgtattttaattaaattctactacttaattattgaatatttgtgaaacatgcagcatagtgaaagtgagcggaaaagggcgaaagtgttgaagaaatatcaagataagatgaactatataagtcaaattgcagggggagcaagagcacaagcagaggaaagacgaaggaatgaagtgctcaaagcaaaagagaaggcaaatataattagaacaacaggcaaaattccagggccatgctcttgcttctaacaacaacaattatatatgtacatattacataactgagtttgggtataacaaaaaggaatatgtaattatttgttttataattctatggtttctaactgtacaactctcagaactcatttgtagcgggataatttttcattttatatggaaaaaaaaaggaaaggagcagaaaaatattctgtaaaactgaacacatgtggagctaaatttggtgtaagttagttcctgttttctttatttcttcggagtttcattaccacactttatgaatgagacaaattaatttctatccataaagctaaactttgattagtgaagaagggagttttaggtgaataaaatagtataaaatctctacttttataattctctaaaaataaaaaattatttgatttcatctactgtgtagaggtaatttagtatcaaagtgtgggattgatggactaataatgggttattaaaaaaaaactaacttaacccgccccaaatgtacaacactcttttttaacttacttttattgaatgaaattcatgcaagtctttataatgttgtgtatagtaaagaggcatgaaaaataaaaaagataaaaagatagaaaaaatgaaaaataagaaaaaagaaaataaaagagattaaatattttaattgtagtagttaggaaataagaaaaaaagtacaaatttaccaaaattccattttaccctgacacaaaaaaatatttccggtactctttgatatgaaaacattttttttattatttaaagacataatcgactatgcaatgcaacggcataatcgattatatggcttgtttaatttgtttactggattgaaggcaaataatagattatgtaatgtaagcatccaaatccaaaagattatgtaaagttgctttgctgaaagcataaagtaactttgaccagccagagcttaatggaccaatttctggtgcaattaaggttgaaacatatctgtgaaataatttattgcatatggataccatgttctcggttgaatctgtaaattattttgcactatcatgaataagcaaatataaatcattccacggtctaaattcactggaaacttgctagcattatccctcttgaaaagacctatgatgctatctttaacttgtgaatcagtattagtgaatgggcctcttcaatatcttatttttctaaacggatattttgtgaacatgttaattcttaacaggtttaagcatattattcttcctatagctgctgcctgtgttgcaaaggagaaactagaacatgtagattttgaatcattctctacgcatacaatttgccatgaatgctgccatggaattggaccacataccataacacttccaaatgcccgaaagtccactgtcagattggtcagttccacaatatacttcacttaagcaatttctttgattgctaaaatttttgcagtaaacttactgtcagtatgaccattaaattcattgtcattgttattattattatttttaaaaaaaaaagttattggtgaaaatctgaaccaattattctgtatttattgtacagtggtttaaggcaagtcatatctgatttagaggaaacaaaatctcctataattatgtatatctgttgtaaatttttaactatacaaaccaatctccatagtatcttaaaaatgctgttccagcatctctatttgaataaaatatattacttacaaatggttgtatcattccttttgatacaggaattacaagaattttactcggcactggaagaagcaaaggctgatataggttgcctttgggcattgaggttcttaatatcccaggttagttattatactcttttttttattctctgtcggggatgaaatattaatttattgaaggaaaggttaaaatacatggcatgaggataaggagtcatcctaaaacagggaaagcatgtaaaaggaacatgaaatagaaagtaaaccatcatcttgactatgctctcaatatcttcaaatttataagaaacaaatcccctgaaaaatccatggtagacagtagtttcttaaaattcttatggttgcactcaagcctgtaatgttgtgtttgacttcatacattttctagacattatgttgttttgaggctcactactgatgctaatgtcattgactgtctctgattttagcatgattttctttctgatagtttattgaagtccatgtatgattcttttcttgttggatgcttccagtcagtacgttttggtttagaggaagctcatggggcgttgctagctatgcatacttctttcatctcatgtttattattgtgatgtgatttagcatatctaaatctactgtatattgtcagaaaaggacaagctttccagttcaactagttatatgagaaaggagcctttgtctgggattctgaaggcacaatctctgtcagttgaaagcctgatagggagatactcaccatgcaagccaaaggtgataaagaggctgctggtttgcttctccggaaatactgtgttgattgaaccactgaaggtttctctaaaaaagttggagaatattcaggtataaatctttagaccacagttctgttggttgtgtaagatgatgagtgcattgtaatgcttaatgaggcttagttccaatataacagtttttcacattacaaaacctgaattacttgtctaaattagcatttacttatggcccacatttccaaaacacctgaagtctataccttgtttgtaattgtttgtgtcaattgaagaccatttttaattattaaaattttttagcttctcacatttttaagactggttaaaaggttgtctcaaatttctgtacttgttacatatatgcctaaaaacgtcagtcaacgttagtgttttgaaagatgtttctttaagctattgcacaacatgcactcattggtaatatactcttctgcaagtcaatggataataatgtgttcctgttgttaactttcttgagcagtcctaattctgctcatatgtgtgcaaaactcatttcccttgataaattttccatgtctgaagtctcggcaaaaaaataaaaataatacttttttaataaataatttgaaatttgggactgtttggaaaataatttgaattttaggacagtcaaacacgccgaatttgggcgtgtttaaacatgcttaatttaggcatgtttctcctgattgtgactcgtgtcatgcatgcgcaatgtgtataaacttcgaacgatcataattttttataagaatgtccgattgatgcgtagtttttgtcaaaacgctccaaattgagagaggaagacctacgtaaatcccaaaaggaatttgatcaactattttttccaaaaacacgcctcgaagtgcctcaaaattaggatttaggattcaatcatccaaaaatttcatttttgtctacttttttaattatttaattagttaatttaatgccactttttattttttaattacttcttttaatttcgagcgttttgacataaaatacgtctcgatcgtacatttatatcaaaagttataaccatttgaaggacatatcatacgcctaatttgggctaatttttttgcaaaaattaagatgtaaaaataaaaacatcaatttaaaaaattatgggtgaattaaaaattatatgcatatttaattatatacaataatgaatttgaacagattaaattgaattttgactcaaatcttaaaataaaaattgaaccaaaatcaaaaactcaaaaagtgtatctagacacaagttattttcatgaaaagtaatgtttcgtaaaattaaaatagataccattttatggaattcagttataaaaaaaccaaagttaataaaaaaaattatcccaaattaggtaatgtttttttggtatatctatttaccaaaattatactgtaaagttttaaacgatttcagtttaaaaaattaaaaaatcacaatattgtggtcgcaacactaatttcaaaaattgaaaaaaaaattatactgtaaattaaaaattgattttaaagtcgtacgctaatttcggtttctatttcagtcgtaacactttttgcgacagaatattgtgatcgcaaacattaaaaaaccacgatattctgtcgcaaaaagtgttagcgaccgaattagcgacggaggtgttcacgcccaaattgggcgtgtttgactgtcccaaaattcaaattattttccaaacagccccaaatttcaaattatttactaaaaaagtattatttttatttttttgccaagtctcctaatacactattctttcatacaagctctgatttaaaaatgttacaaaaactaattttttatatattgtattgtgtaccctaggtacctgttgatgtagctccggtctttcccattgccaacaatatattgcagtgaaagcaagcaaaccaatgtgcaaaagtttcaatgctgtcatcgtacgttgtgtcagccaggaaaatttattcaatgagtgtcttcgcgctagttattactatgaaatagtggaatgcttgtttctttgagatgttgttgttttctgttgattcaatcaaaaggaaaacaaatcgtggtcttagaaaggagttttagacctttataaggttattatgctaatgatgagtgacccaactgatatttaatcgtatcaatttcaaggttttgattccattcttgttgatggtcctctgtttgtaagttatggtgaaaggtatcattgtaaaccttatatagggttattacttattacatgttttgatatttaaatagagcaacatcaaacttcttccaccagaaaaagaaatgaagttaaacaataagcaagatcttgaattaataagctttatcttcaatatatatccaattcaaattttgttatctagtaaaaaaacataattaacatatgaaattataagagcaaaattaactgtcatgcttaagttgtttttattgttagggattggtacccaaagaagattgccctgttggagaagtgtgctttggcagccagctagaggaacgtttcttctttaagtaatggtttgttaccatagaaaatggaacaaactaatagaatgaaaaatacaactaagattacaattgaatccaagaaaaatcaacaaaaaaaatacaattaattctcacaaaatcaaccaaaaaatttaagatcattcttattgaggttctgttaacaacatgctaatatgaaactatgaacaatttgttcaatacaatattttgtgctaaattagttgggttattcaacattgttttatatgttttgtctttgtaaaagccatgttgtaccaaattaaggagcgagtattagtgtgggagaggaagtgcaaagagtatttgagaatactccttgtgtaatcaagttgattatagtaccaaaaaaaatcacataaaaataaaagaattagatggccaatgttaaaagaatttgataccacatttaagtaaagcttctaatgccgaaaatcgtgggttgctagatgatattgattttgaaaggagctacaaactatcattttgcatatttttttcttgtatcataaatatattcttaatttgttacacttttattagttggttttttttatagtcaaaaatcagattttataatctaacttattgacattgtttccccgtaatcatagttgtgaaactcaatctagtcattgacccgatcgagataataggtcagcaagttagtggtccaactggtgaaccaataattagcctaatttgactcgatatatattaagaattcaaaattatatatatatatatctattacatataagtatataactaacattatttgagtaagaaaagctcatccacattccaaaatccaaattttaaaaaattataaaaattaggttaaaaaaaaaaatcaaccgagtcggacaggtccaattgggacctggtgacctgaccgggtttaaccggatcaactgtttaactgattcgaaagtggaactgatctgattatgtcatcgaatctcgatccgaccggccagtctagatcaagtttgataacaatgcccatatacacacacacacaatctatcacttcattcacttgcaagcttgcactataatcagaacattttaaaataattattcaacttggagaatataaggtaaatgaacaggattaacttacaatttaatacaaagaaaaataggtatcaaatatcaataatcatccagcgattcaacacaaaatccaattactgatatcataaacttggatggtcccacaccataataaatataatccaatatattatggttttacaaagatagtttcactcttggaaaaccagataatagaacattaacatcaacaaaccacaataataaaatatcttttacttgtcaaaaacataaaataaaataaaaacatcaacatacaacatgcttatttgtaccaattacaaatgttatagagaaaatttatagtgttgggttcagatgattcaatagaaaccatcccactggtgatgaaagaaaagtgacaacttgattgaaatggtcaccaaatattgcgtggccaacacctcaacaacaatctgtatcaaaatttccaaattaatattatcaataagaattgtgcaacaccgtattaattcaaaataaattccatattctagcatagacaacaaccaatattatctaccatttgagtttgtaaacaaaacatttgatggaatttctaatttttttttttcaaaaaagaaaataagattagaaagatggattccatcattttacttccttaacattaatttggctcaattatccatcacaccaattacaccactctgtatctactagtaaatacaaaaaaaattaatatcttgtgtaaagcaagactaagtatatgtcataaacactaagtcagaactaaaatcaagaaaagacaatctctaatcaaacatattaaaatatatccttttaacaaatgaaatcaaatttaaataaaatataaaaagattcttatactccactataccaacaacaatctaaattaaggaatcacataactttaagacaatataaaatatcaacctttatataaatagaaggtttaattatttaaacatgttccaagttaaaaaataaatccctgaaactttcaaaaattataaaagggttaaatatataaatatagacatgtttatgtttagtattttaaaaataactcatctaattttattccctccatttttgaaatatgtaatttgtagtccctaatttttagaaaaataatctctttttaatctctaacttatagaaataggaaccacacaacacaattccacaagattaaaatgtaactttatagtccaactcttggacaatccttccaaaaaaaaactctcgatcaactcttaacgattcaaaaaatttaataaatagcttttcagtactatattcgttcaattaaaataaaattaaaccccatgatgcaaagtagcacagttaaaatttgaaagaaataaaaatataatgaccacacaatactttctcataataattgaagccttcttttaccttctggatggttcctacttcctactcatgccacaggtcatattatcacttcatcatttatcttgatcgcaggaatgtgagcaatcttagaccagtgtttccctttccgactttgataccttgcttctagtaaaggacattcatatataaacagtaattcaagagaggatggaagctgatcttcgggcaaggactcgaggcttttacaattcctgatgccaagctctgtgagggaagtgaggtgttgaagcccttttccttccaacaactttaaatcatcaaaattccatatggacagaccttgcagcgaagtgggcagtaagcactccttcaacagggtgttaacaacatcttcctccccataaccacgaatggaaagaagagacagagaagtgaggcgttggaataggaaacctaactcgtgtttagacattgatgatagaattccaacatcaacatcgagtctttgtaaactggaaggtaaacaccttgggggcaatgatgttagctctggaagcatagaaagccctaaaccttgaagggcagggagatgaatctgttctggaagtgacctaagtttcttacaattctcaactagaagatgagttaatttgagagcattcgttccaccttgagtagtaattgcttccatgtcgggacattcccagattgtaagacctcgtagggaagagaaaccatctaatggtaaggacgccagggaatggcagctattgacaattgacagatattcaagtgatgtgtatttgtggcatgattcgggagacagaaattctaagttctcacagttgaaaatgctaagtgattgcaatgacgttggcaagccatcggctgggaaggaaatcaaattggggatatccttaagagtcaacctttggagacaattggcagctagtatcattcttggcaaagatgacaagctgtcacactttttaatccgtagattcctataagaaaagttgtcaagcaaggacaacaaatcttctcctgcttctctaacctttatttcttcaattgatgtgttccaatgtagatcatgtgattttgcctctagcttgttgcactctgatatacgaacatgtgtcaacgaaggtagatggttgggcaagtttcctctcaacttggggcatgttgataaactcagacgcttaaggcaaggcaaaggcaacttgctgccttcaccttcaaatggtagccactcttcccactctgacatctcttcgaactggatactctccaacaatggaaatggttgaaatgaaagggagcccccattgtcacagtagaattcttcaccaactgtcttcaccattttcatcctttttatcacaagctccttgagagaaggtagttgtccaaacggtggaagtgaaaagcaatagttgcaattagtaatggaaaggaatataacataagagtatgaagagtcacccaaccatttaggaaagcttgtgccactgtagtatcttatgctgagtttctttaaatttgtcgatggttgcaggttctgaagtacatctttctcaagttgtgaatcttgtgcctcactgccccactctagcgtaagctcctcaacatgctctttcttgtttaagtcagcttgaaaagcatgcttgggatcaacaacattttgtagccccaaaatagaaagcataccttgcaagtaaggaaactttcttaattctctgatatttactccatcttctctgcctacaacaaaagaagtcaacacacggagatcttgtagcttgcttatttgtgctggcatctccgtcaaatttgtgcctctaatatcaaggtggcgtagattgaccaaatttcctatctgttcaggcagctgattgatagaagtataggaaaggtcaagatgtcgtaaaagtaacaaaactcctatctgtacagtcaactctgtaagataattacaatgtgataatttcaaagtctgcaaattgtaaagcctaaaggttgcatcaggcaaccttttgatggaagtnnnnnnnnnnaaaagaaatttattattattattattattattattattattattagttctttggttttaatttcattagtttctacctcttaaagttatttatctatgataattattatattttgacactatatattttaatgtaagtattattaggattatttatcaataagaattattatttatctttttatatttttaatattataattattacatgctacttttcatatattattatttttctcattttaattgatttcgaaaagacaatgtcattattaataataactatattattattaaatactctactactattttatatttatgatacataataatatttattaatatttaaagtctaaatttatgagaaaaaatcataatgtattatcatttactgttctgaaaaaactttagtattattattatcatcttatttgtatattannnnnnnnnngtgcctctaatatcaaggtggcgtagattgaccaaatttcctatctgttcaggcagctgattgatagaagtataggaaaggtcaagatgtcgtaaaagtaacaaaactcctatctgtacagtcaactctgtaagataattacaatgtgataatttcaaagtctgcaaattgtaaagcctaaaggttgcatcaggcaaccttttgatggaagtataggaaaggttgagatacctcaaaagcaccaaattgcttattgaattaggcaactcaatgatatttccatagccaagcaaggacaatgttcgcaaatattttagttttggcaaccaatcatgtgacacctttttggttacatgcccataactgtcaggtccatatttaaagagtggtaaaaagctgcgcaaaaactttagtccatataagccctcaaatcttttagagacatcaagatttctttgatgatatgtcagatggcgaacatttattgggacttctcctccttcaaagtaacaagatctcttaccagatactagtctggctaaatcgtaaataaggtcatgcattcgaaactgttcttttcccacatttttgtctttttcaattaaagatctagataacaattcattgaaatagtcttcacctgttgattccattgctttctctccgttctgtggaagaaagccttcagccatccataacagaatcaattccttcctatccaacaaatgttgtctaggaaaaattgagcaataggcaaaacatctttttagatgtggtggaagttgaagataacttatgcataaagctggtaaaacttcattatttgcccacatgttgctgttcagaattccattccaataatctgcatcaacatttgatcgcaaaagacctcccaatgttttagctgctaatggtagacccttgcattttgttgcaatttgtctaccaatttctgctaggatgggatatttgtcatatccttgatttccaaatgcatgtttagcaagtatacaccaacagttgtcatctgtaagaatcttcagctcgtgaatgggaaatgtacgagtgatttctgcaattctgtgttgtcgggttgtcacaatgattatacttcccttcttcccgcagctaaaaggggctattagttgatcccaatcatcatactgcatattccaaaggtcatcgagcacaagcaaaaaaaatttatctttaaaggtgttcttcaattcaactcgaagagcatcaaaattagtaatatcacaagtttttgaagtggcagattcaacaattgccttcgttgccttaaacacatcaaaaggatcagatacccatgcccaagctttgagatcaaaatggttctgcactgcatcgtcatttaaaaggctctgagcaagggttgtttttccaagacctcccatgcccactattgtcagcacttttatgtgattattattctcatcttcatcagagagaagcatgctcaacagcttctttttgtcatcgtctcttgcaacaacatattccaccgatcgatctgtatcttttcggtaagagactctgccagcaacacttttcaaaccaagaatatctttttgtttggtaaaattttctagccttccagatattgcttcaagtttggaattcatgctcctatagaattgattaaagggagaagaaagtgatgaccacacctggcttttaaaggttttgtattgttcctccaccttgcacctcagagaatctgtgttgattaggtccaacaaatcctctgcgtctaaaacagcatctttcaactcatcaagccatgccttcacttctgaattagtgatctgtttctcctcagcatcattgagcacagcactgagtgccaacagctttatcttcagctcatccaagagagaaacattcagctttctattggcaaagaaatttcgaaactccgcagaagttatcctatccagcaagatctccacagaagcagagataagtgcctctcccaccatagcgaaagccatctcttctctagttttgcaaatagtatcagatctctgaagctttagtcaaaagctgaaggtgatatggtagctggtgaggaattaaggtattataatataaacgcgttaaccagtttcttttttatcataaataaatactttatttgcggatcctggacatgatactggacatggagaataaatatatgttttttttttttttagctttttaagggcaatgatactggacatggagaataaaaattgaaagaaaataccttgtcaaatttgtggatgtgattaagttgccttaaataaatatttatacaatgataataaagtaataataggagtggtagatagttttgattcacaatttcttacattgaagttcttataagacaatgtgtggtgatgtgtccttacaagaagttatttttttgtctctcaatatatatttatctttcttacaccaatttatatatatcaaagtcatctcacaattttattcatactttattggatgaaatttgaaatgaggaacttaatttattaaattgtataaaaataaagtgtaaagaattaaaatttaaaatactataaaatttcccataaattaaaatatgactgagaactaaaaaatatataattaaatcaaaacaaaacatagcctaaattagagatccctgtagaataaaaatcgaagccttgcaagtggtggctaacggattcccaaataacataggacctaagaaatgtatatattnnnnnnnnnnnnnnnnnnnnnnnnnnnnnnnnnnnnnnnnnnnnnnnnnnnnnnnnnnnnnnnnnnnnnnnnnnnnnnnnnnnnnnnnnnnnnnnnnnnnnnnnnnnnnnnnnnnnnnnnnnnnnnnnnnnnnnnnnnnnnnnnnnnnnnnnnnnnnnnnnnnnnnnnnnnnnnnnnnnnnnnnnnnnnnnnnnnnnnnnnnnnnnnnnnnnnnnnnnnnnnnnnnnnnnnnnnnnnnnnnnnnnnnnnnnnnnnnnnnnnnnnnnnnnnnnnnnnnnnnnnnnnnnnnnnnnnnnnnnnnnnnnnnnnnnnnnnnnnnnnnnnnnnnnnnnnnnnnnnnnnnnnnnnnnnnnnnnnnnnnnnnnnnnnnnnnnnnnnnnnnnnnnnnnnnnnnnnnnnnnnnnnnnnnnnnnnnnnnnnnnnnnnnnnnnnnnnnnnnnnnnnnnnnnnnnnnnnnnnnnnnnnnnnnnnnnnnnnnnnnnnnnnnnnnnnnnnnnnnnnnnnnnnnnnnnnnnnnnnnnnnnnnnnnnnnnnnnnnnnnnnnnnnnnnnnnnnnnnnnnnnnnnnnnnnnnnnnnnnnnnnnnnnnnnnnnnnnnnnnnnnnnnnnnnnnnnnnnnnnnnnnnnnnnnnnnnnnnnnnnnnnnnnnnnnnnnnnnnnnnnnnnnnnnnnnnnnnnnnnnnnnnnnnnnnnnnnnnnnnnnnnnnnnnnnnnnnnnnnnnnnnnnnnnnnnnnnnnnnnnnnnnnnnnnnnnnnnnnnnnnnnnnnnnnnnnnnnnnnnnnnnnnnnnnnnnnnnnnnnnnnnnnnnnnnnnnnnnnnnnnnnnnnnnnnnnnnnnnnnnnnnnnnnnnnnnnnnnnnnnnnnnnnnnnnnnnnnnnnnnnnnnnnnnnnnnnnnnnnnnnnnnnnnnnnnnnnnnnnnnnnnnnnnnnnnnnnnnnnnnnnnnnnnnnnnnnnnnnnnnnnnnnnnnnnnnnnnnnnnnnnnnnnnnnnnnnnnnnnnnnnnnnnnnnnnnnnnnnnnnnnnnnnnnnnnnnnnnnnnnnnnnnnnnnnnnnnnnnnnnnnnnnnnnnnnnnnnnnnnnnnnnnnnnnnnnnnnnnnnnnnnnnnnnnnnnnnnnnnnnnnnnnnnnnnnnnnnnnnnnnnnnnnnnnnnnnnnnnnnnnnnnnnnnnnnnnnnnnnnnnnnnnnnnnnnnnnnnnnnnnnnnnnnnnnnnnnnnnnnnnnnnnnnnnnnnnnnnnnnnnnnnnnnnnnnnnnnnnnnnnnnnnnnnnnnnnnnnnnnnnnnnnnnnnnnnnnnnnnnnnnnnnnnnnnnnnnnnnnnnnnnnnnnnnnnnnnnnnnnnnnnnnnnnnnnnnnnnnnnnnnnnnnnnnnnnnnnnnnnnnnnnnnnnnnnnnnnnnnnnnnnnnnnnnnnnnnnnnnnnnnnnnnnnnnnnnnnnnnnnnnnnnnnnnnnnnnnnnnnnnnnnnnnnnnnnnnnnnnnnnnnnnnnnnnnnnnnnnnnnnnnnnnnnnnnnnnnnnnnnnnnnnnnnnnnnnnnnnnnnnnnnnnnnnnnnnnnnnnnnnnnnnnnnnnnnnnnnnnnnnnnnnnnnnnnnnnnnnnnnnnnnnnnnnnnnnnnnnnnnnnnnnnnnnnnnnnnnnnnnnnnnnnnnnnnnnnnnnnnnnnnnnnnnnnnnnnnnnnnnnnnnnnnnnnnnnnnnnnnnnnnnnnnnnnnnnnnnnnnnnnnnnnnnnnnnnnnnnnnnnnnnnnnnnnnnnnnnnnnnnnnnnnnnnnnnnnnnnnnnnnnnnnnnnnnnnnnnnnnnnnnnnnnnnnnnnnnnnnnnnnnnnnnnnnnnnnnnnnnnnnnnnnnnnnnnnnnnnnnnnnnnnnnnnnnnnnnnnnnnnnnnnnnnnnnnnnnnnnnnnnnnnnnnnnnnnnnnnnnnnnnnnnnnnnnnnnnnnnnnnnnnnnnnnnnnnnnnnnnnnnnnnnnnnnnnnnnnnnnnnnnnnnnnnnnnnnnnnnnnnnnnnnnnnnnnnnnnnnnnnnnnnnnnnnnnnnnnnnnnnnnnnnnnnnnnnnnnnnnnnnnnnnnnnnnnnnnnnnnnnnnnnnnnnnnnnnnnnnnnnnnnnnnnnnnnnnnnnnnnnnnnnnnnnnnnnnnnnnnnnnnnnnnnnnnnnnnnnnnnnnnnnnnnnnnnnnnnnnnnnnnnnnnnnnnnnnnnnnnnnnnnnnnnnnnnnnnnnnnnnnnnnnnnnnnnnnnnnnnnnnnnnnnnnnnnnnnnnnnnnnnnnnnnnnnnnnnnnnnnnnnnnnnnnnnnnnnnnnnnnnnnnnnnnnnnnnnnnnnnnnnnnnnnnnnnnnnnnnnnnnnnnnnnnnnnnnnnnnnnnnnnnnnnnnnnnnnnnnnnnnnnnnnnnnnnnnnnnnnnnnnnnnnnnnnnnnnnnnnnnnnnnnnnnnnnnnnnnnnnnnnnnnnnnnnnnnnnnnnnnnnnnnnnnnnnnnnnnnnnnnnnnnnnnnnnnnnnnnnnnnnnnnnnnnnnnnnnnnnnnnnnnnnnnnnnnnnnnnnnnnnnnnnnnnnnnnnnnnnnnnnnnnnnnnnnnnnnnnnnnnnnnnnnnnnnnnnnnnnnnnnnnnnnnnnnnnnnnnnnnnnnnnnnnnnnnnnnnnnnnnnnnnnnnnnnnnnnnnnnnnnnnnnnnnnnnnnnnnnnnnnnnnnnnnnnnnnnnnnnnnnnnnnnnnnnnnnnnnnnnnnnnnnnnnnnnnnnnnnnnnnnnnnnnnnnnnnnnnnnnnnnnnnnnnnnnnnnnnnnnnnnnnnnnnnnnnnnnnnnnnnnnnnnnnnnnnnnnnnnnnnnnnnnnnnnnnnnnnnnnnnnnnnnnnnnnnnnnnnnnnnnnnnnnnnnnnnnnnnnnnnnnnnnnnnnnnnnnnnnnnnnnnnnnnnnnnnnnnnnnnnnnnnnnnnnnnnnnnnnnnnnnnnnnnnnnnnnnnnnnnnnnnnnnnnnnnnnnnnnnnnnnnnnnnnnnnnnnnnnnnnnnnnnnnnnnnnnnnnnnnnnnnnnnnnnnnnnnnnnnnnnnnnnnnnnnnnnnnnnnnnnnnnnnnnnnnnnnnnnnnnnnnnnnnnnnnnnnnnnnnnnnnnnnnnnnnnnnnnnnnnnnnnnnnnnnnnnnnnnnnnnnnnnnnnnnnnnnnnnnnnnnnnnnnnnnnnnnnnnnnnnnnnnnnnnnnnnnnnnnnnnnnnnnnnnnnnnnnnnnnnnnnnnnnnnnnnnnnnnnnnnnnnnnnnnnnnnnnnnnnnnnnnnnnnnnnnnnnnnnnnnnnnnnnnnnnnnnnnnnnnnnnnnnnnnnnnnnnnnnnnnnnnnnnnnnnnnnnnnnnnnnnnnnnnnnnnnnnnnnnnnnnnnnnnnnnnnnnnnnnnnnnnnnnnnnnnnnnnnnnnnnnnnnnnnnnnnnnnnnnnnnnnnnnnnnnnnnnnnnnnnnnnnnnnnnnnnnnnnnnnnnnnnnnnnnnnnnnnnnnnnnnnnnnnnnnnnnnnnnnnnnnnnnnnnnnnnnnnnnnnnnnnnnnnnnnnnnnnnnnnnnnnnnnnnnnnnnnnnnnnnnnnnnnnnnnnnnnnnnnnnnnnnnnnnnnnnnnnnnnnnnnnnnnnnnnnnnnnnnnnnnnnnnnnnnnnnnnnnnnnnnnnnnnnnnnnnnnnnnnnnnnnnnnnnnnnnnnnnnnnnnnnnnnnnnnnnnnnnnnnnnnnnnnnnnnnnnnnnnnnnnnnnnnnnnnnnnnnnnnnnnnnnnnnnnnnnnnnnnnnnnnnnnnnnnnnnnnnnnnnnnnnnnnnnnnnnnnnnnnnnnnnnnnnnnnnnnnnnnnnnnnnnnnnnnnnnnnnnnnnnnnnnnnnnnnnnnnnnnnnnnnnnnnnnnnnnnnnnnnnnnnnnnnnnnnnnnnnnnnnnnnnnnnnnnnnnnnnnnnnnnnnnnnnnnnnnnnnnnnnnnnnnnnnnnnnnnnnnnnnnnnnnnnnnnnnnnnnnnnnnnnnnnnnnnnnnnnnnnnnnnnnnnnnnnnnnnnnnnnnnnnnnnnnnnnnnnnnnnnnnnnnnnnnnnnnnnnnnnnnnnnnnnnnnnnnnnnnnnnnnnnnnnnnnnnnnnnnnnnnnnnnnnnnnnnnnnnnnnnnnnnnnnnnnnnnnnnnnnnnnnnnnnnnnnnnnnnnnnnnnnnnnnnnnnnnnnnnnnnnnnnnnnnnnnnnnnnnnnnnnnnnnnnnnnnnnnnnnnnnnnnnnnnnnnnnnnnnnnnnnnnnnnnnnnnnnnnnnnnnnnnnnnnnnnnnnnnnnnnnnnnnnnnnnnnnnnnnnnnnnnnnnnnnnnnnnnnnnnnnnnnnnnnnnnnnnnnnnnnnnnnnnnnnnnnnnnnnnnnnnnnnnnnnnnnnnnnnnnnnnnnnnnnnnnnnnnnnnnnnnnnnnnnnnnnnnnnnnnnnnnnnnnnnnnnnnnnnnnnnnnnnnnnnnnnnnnnnnnnnnnnnnnnnnnnnnnnnnnnnnnnnnnnnnnnnnnnnnnnnnnnnnnnnnnnnnnnnnnnnnnnnnnnnnnnnnnnnnnnnnnnnnnnnnnnnnnnnnnnnnnnnnnnnnnnnnnnnnnnnnnnnnnnnnnnnnnnnnnnnnnnnnnnnnnnnnnnnnnnnnnnnnnnnnnnnnnnnnnnnnnnnnnnnnnnnnnnnnnnnnnnnnnnnnnnnnnnnnnnnnnnnnnnnnnnnnnnnnnnnnnnnnnnnnnnnnnnnnnnnnnnnnnnnnnnnnnnnnnnnnnnnnnnnnnnnnnnnnnnnnnnnnnnnnnnnnnnnnnnnnnnnnnnnnnnnnnnnnnnnnnnnnnnnnnnnnnnnnnnnnnnnnnnnnnnnnnnnnnnnnnnnnnnnnnnnnnnnnnnnnnnnnnnnnnnnnnnnnnnnnnnnnnnnnnnnnnnnnnnnnnnnnnnnnnnnnnnnnnnnnnnnnnnnnnnnnnnnnnnnnnnnnnnnnnnnnnnnnnnnnnnnnnnnnnnnnnnnnnnnnnnnnnnnnnnnnnnnnnnnnnnnnnnnnnnnnnnnnnnnnnnnnnnnnnnnnnnnnnnnnnnnnnnnnnnnnnnnnnnnnnnnnnnnnnnnnnnnnnnnnnnnnnnnnnnnnnnnnnnnnnnnnnnnnnnnnnnnnnnnnnnnnnnnnnnnnnnnnnnnnnnnnnnnnnnnnnnnnnnnnnnnnnnnnnnnnnnnnnnnnnnnnnnnnnnnnnnnnnnnnnnnnnnnnnnnnnnnnnnnnnnnnnnnnnnnnnnnnnnnnnnnnnnnnnnnnnnnnnnnnnnnnnnnnnnnnnnnnnnnnnnnnnnnnnnnnnnnnnnnnnnnnnnnnnnnnnnnnnnnnnnnnnnnnnnnnnnnnnnnnnnnnnnnnnnnnnnnnnnnnnnnnnnnnnnnnnnnnnnnnnnnnnnnnnnnnnnnnnnnnnnnnnnnnnnnnnnnnnnnnnnnnnnnnnnnnnnnnnnnnnnnnnnnnnnnnnnnnnnnnnnnnnnnnnnnnnnnnnnnnnnnnnnnnnnnnnnnnnnnnnnnnnnnnnnnnnnnnnnnnnnnnnnnnnnnnnnnnnnnnnnnnnnnnnnnnnnnnnnnnnnnnnnnnnnnnnnnnnnnnnnnnnnnnnnnnnnnnnnnnnnnnnnnnnnnnnnnnnnnnnnnnnnnnnnnnnnnnnnnnnnnnnnnnnnnnnnnnnnnnnnnnnnnnnnnnnnnnnnnnnnnnnnnnnnnnnnnnnnnnnnnnnnnnnnnnnnnnnnnnnnnnnnnnnnnnnnnnnnnnnnnnnnnnnnnnnnnnnnnnnnnnnnnnnnnnnnnnnnnnnnnnnnnnnnnnnnnnnnnnnnnnnnnnnnnnnnnnnnnnnnnnnnnnnnnnnnnnnnnnnnnnnnnnnnnnnnnnnnnnnnnnnnnnnnnnnnnnnnnnnnnnnnnnnnnnnnnnnnnnnnnngaattaaaatgtgtaattgtataattgaaggttacagtaacttgtataaaaaaaaaaaagttaaggtgttgcacattgttaattttttatgtacataatgaaaaaataaatgtgttttttttaattactctaaaaagaatataaacaacacatgcatgttgtcaaattataacatctttttgtctgaataattggcaaatcaagatgattctccctaggaaacaatgccgtactgctaatagattgcagtatatatttttaaatcaagatgattggcaaattataacatataaaataaatatatttttaatataatttatttaaaaaaataattaggatttaaaagtgacaagtgaggtgggagagattttgtgaaagaaatatctgtgaaatttgtgtggtggaagatatgtgggtctggcttatgctcttttatctgttttgagcattaacacatgtggtgtggtactgtttgctttgagtgtcggcaaaaccgtgttgctttctgtttctgaggttattaagcaatgacttccacgcgtttgttattgcgtgcatgatacactcgtatcttgatggcacggccgtgtcttaaaaatttgcgaccttagacatttttttttatagaaatataatataaattatttttttatattaatattctaattttacaaactttgtaggaatatcagtatattcaatattattttgatgtaattgatttatcattttttgaactaatttttgtatcttttttacaaatattaacaaatttattaagattgaaacaattttattaaacttttttctttattttttaaaatcaaattcataatttttattttacattttctatcactacaaaatataatataataaagtaaaaggaaataataaagtatttaaataaaataacttttcaaagtaaacaaaaaaataagcttttgattttataggcacattaaaatagcttttgattgcataatgattttacaaaactggaaacaaataaaattaattgtattcagtcgattgcaattttataggtacattaaaatagctttagattttctcaattaattttggcattgcaataatcacaatactattttacacgagtgagtagtagttaatcatgatagttaatttaattgaatttacaattaaactaaatttttaaaaatatgatactaaaattaaatttaaggacaattataattaatgtcaaaaacaataattattatgaattatataaaatatatggttataattgaaaaaatatgaggcttaaagtcactgtctaactcatgtatcagtcaacacaatccaggaatcatattcatatgaagtatttactttgtcataaacaatttgactcatcttcatgagaatcatgaacctatataaaactaatattttcttcttaatttggtctaatccatattcaacatcatgaattaaatcttgaataatttaattaagatacatatatgtcactacttgtgctgaccgttgttgtaagatagtgtgattgtttgatatataacggttgaagatttgcagttgggtggggaaacccattttttcacttaattattaaattctgcaatatgcacactatagtccaagtaagacggtattatttcagccaagtagcaaattaaatgaacaatggtgcatcttgcttggatttacgtctaagaattatagcaacatttaaaatgaaatgattgatacgactacactccttttttggtaggtagagataataaaaaaaataaaatgaagaaaaaagtttttgttatgtggtactatttaatttaagagaaaaaacaattttttctatcttcttatttgtttaaataaaaaattaagaagtacattattaactataaaaatatataattatttttgtataaattttttgataaattttcattttatcaatttatttgtctgtaatttgggtgaacttttattttatttataaatatttgatcttaactttaacttgttttccttatcctctgacctctgaagagaagaatttttacataagttgaaataatttttaataagtttttttaaaaaatatattacacaaagattcaaaataattaatattagatcattctattttaatcaattctatgtttagtttttattaacttagtctcttttattaaatccacaatctttttctctcttcttcttttatcatccaaccaatcttataatttcaattgagtggtaaaataatttctctcttaaaaaagcatgttttttacatcacataaagaattttttttatcannnnnnnnnnnnnnnnnnnnnnnnnnnnnnnnnnnnnnnnnnnnnnnnnnnnnnnnnnnnnnnnnnnnnnnnnnnnnnnnnnnnnnnnnnnnnnnnnnnnnnnnnnnnnnnnnnnnnnnnnnnnnnnnnnnnnnnnnnnnnnnnnnnnnnnnnnnnnnnnnnnnnnnnnnnnnnnnnnnnnnnnnnnnnnnnnnnnnnnnnnnnnnnnnnnnnnnnnnnnnnnnnnnnnnnnnnnnnnnnnnnnnnnnnnnnnnnnnnnnnnnnnnnnnnnnnnnnnnnnnnnnnnnnnnnnnnnnnnnnnnnnnnnnnnnnnnnnnnnnnnnnnnnnnnnnnnnnnnnnnnnnnnnnnnnnnnnnnnnnnnnnnnnnnnnnnnnnnnnnnnnnnnnnnnnnnnnnnnnnnnnnnnnnnnnnnnnnnnnnnnnnnnnnnnnnnnnnnnnnnnnnnnnnnnnnnnnnnnnnnnnnnnnnnnnnnnnnnnnnnnnnnnnnnnnnnnnnnnnnnnnnnnnnnnnnnnnnnnnnnnnnnnnnnnnnnnnnnnnnnnnnnnnnnnnnnnnnnnnnnnnnnnnnnnnnnnnnnnnnnnnnnnnnnnnnnnnnnnnnnnnnnnnnnnnnnnnnnnnnnnnnnnnnnnnnnnnnnnnnnnnnnnnnnnnnnnnnnnnnnnnnnnnnnnnnnnnnnnnnnnnnnnnnnnnnnnnnnnnnnnnnnnnnnnnnnnnnnnnnnnnnnnnnnnnnnnnnnnnnnnnnnnnnnnnnnnnnnnnnnnnnnnnnnnnnnnnnnnnnnnnnnnnnnnnnnnnnnnnnnnnnnnnnnnnnnnnnnnnnnnnnnnnnnnnnnnnnnnnnnnnnnnnnnnnnnnnnnnnnnnnnnnnnnnnnnnnnnnnnnnnnnnnnnnnnnnnnnnnnnnnnnnnnnnnnnnnnnnnnnnnnnnnnnnnnnnnnnnnnnnnnnnnnnnnnnnnnnnnnnnnnnnnnnnnnnnnnnnnnnnnnnnnnnnnnnnnnnnnnnnnnnnnnnnnnnnnnnnnnnnnnnnnnactcatttagttagatacgttagtcttttaaaataatttattattttcaatttttaagcataattttaaatttttatttatttattcaatatgtgaaacttgtctaattagattcatgcacataaaaattatagaaatcaattaatgttccaaaataaaaaacaaaataaaaataaaaattacatgaatagtgagtctcacaaaataaataaaacaaaaaaattataatgtcatttttttattgttcattagactcactttgtaattattttcattatatttatagagctttttatttcaaacattagttgatttcaatagttaaataattaaagaatgctaatctatgaaattccaatattccaacaccatctcaagaaaggttaatcttagaaaaatggttagcattgttttaaatttatagttgatagcaaaatagttagtttatattccaagacttaattatttaattcatcaagatttaaaaaataattaatttgatttataacaataaatttattttaaatttataattttttttaaaattatcattgtcattaatatttttttgttttaatgatttgttaatatatttttttcttcttttaataaagtttatttttagtctaaaaataattaatacaaaaaatatgaaaggttgaatcttataaaaataaactaatatcatttcaaacttagatcttgtgaattagaaaaagaggaaatatcaatcttataaagtttaattatgaaaagttgactttacaaaattgagtgatcatgggtgccatgagggttaagggaaccttcctccgttttcgagcactctttgttgaaatgttataccaattcagccatcatatcgacaagtggtagctgaaagtcttaagtaatcaattttgaatgtatgaacttaaacaaatggactatgagtatgacaatgaagtgaacagtctgatgatgaaaatccccctaaagctctttaatgttaagttaaggctttcaaatgttattgtggtacttggatcttcacttatgatgtcctttaagaagtacttctttttttttttttgagaaaaaatgtaagttatattaaactcaaatagatatacaaaatagacggggcatatcccgttaaaatgacaaaatagacacatgcactaagcgcaagagcctatggcagatccactaggagcatgtacctaatagagatgtagcaagtgagaatatctataaacaagaattttgatcttgttaattacatcatctataaaaaatgtggaagtttcaaaagtaaaaggttcattgacatccaagttgagtagactgtagttgctaatgctaagcatcgaaatctcccaaggtgttggatgttgctcttcctcggatgagagatctaatagtgccttgtaaggagactgtttgccttagaagagggatcaagtcatgaatgctaccccacacctgaagtaatactctgaaagagaaaaacaagtgagaatgagattcattttcagttttacaaagtggatagaggagtcccttgttcagaaaagcagcttggtcaaaagtgagcagactattctttgtggaatataaatgatatcttgggtggaatagtaggattccagaccacaggataccaatggactaaaggcttggatactcggatatagtcataagccttccctgctagcaactgttcaatgctaatctaggatttaagagtctgtttggtagcatccaggttaccttctctatttgcaatcagatccctgatgtatataatcctcttaatcaaaactgaatccaagttagaggaattgaattcccaaacattgcctcctttgaaatagttatggtgcacccatcagacccaaagagagtctttctttgaatgaaagtcccaaaggattcaagagaggagagcaaatgttccaatctttaagattaaataatcccaagccacctttcttgggagagcagacctcggcccaagcaaccaataacttcttttttctcaaatcagtcttgccctagagaaaattgcggcaggaagcattaagacgatcaataaaagagttgggcaaaggaaaaatacccatccagaaattggcaatgccatgactgacagcccgaataagttccaatcttcctgcataataataatacaagtaaattacatttacacctcattttttttagattacacaaaatcttcctatcttttctatccctatttttatctttttaattgtttaaaaaaattatagacacctattaacctctttaattattcgaaaaaacactacaatgtcttcaggatattgctgtaaaagttaaaaaaggggaaaagtatatgaaatttcacaaaaatcccaaggaatatagtataatttactttaataatttatagtctctttgacacaattgacacaattatgatgaattacatttataatgcttcacatgcaggatcatttaaactccaaatgataaaattaacaatgctacagtgaatccaaagaggcctgaaaagaccatgacctcaccatcaatgaggaggagttcaagttttggtgaaaaggtgaaaagtagcattgatggtaaaaaacctgagatccaagcccccaaaaggactccaacttttggtgatgaggacttggtccacactggtgaaataaaacctgagatcccacaattaccaagagttcctccaccagttcatcagcaaatgcctttaaagtcgtcgccacctccgttgccacaatcaccatcgccaccgatcaggcagacttcaacaagaccaggtgccaatgaaataaaagcagatgcctgggagagggaggagctggagaagatcaaagaaaggtatatatacttatcttatcactattatctgattggaagaagaatggaaaaaaaatgaaattgagtataaatacttaaattagaataatagatgaaagtgtgggatctataccaattttttaaaactttctactcattttttttttcctcacaaacctaggtttggatatttttgggaaaatcaaatcaaatcaaactgagtgtcacttttttaataaaaacagtggaacataaataagtttaatccaaaatcaattctaatcagaattagtttcattgaaaatcaaaattgcaaacattcacctcactgccccactccaatttaagctcctcaatatgctctttcttctttaagtcagcttgaaaagcataattgggatcgacagcattttgtagcctcaaaatggaaagcttaccttgcaagtaaggaaactttcttaattctctgatatttactccatcttctctgcctacaataaaagaagtaaactcacggagatcttgtagcttgcttatttgtgctggcatctccaacaaatttgtgcccctaatatcaaggtggcgtagattgaccaaatttcctatagggtagctagctgagtaaggcatttacaatttgacaatttcaaaatctgcaaattgtaaagtctaaaggttgcatcgggcaaccttttgatggaagtataggaaaggtcaagatacctcaaaagcaccaaattgcttattgaatcaggcaactcagtgatatttctatagtcatgcaaggacaatgttcgcaaatattttagttttggcaaccaatcatctgacacctttttggttacacgacaataaccgcgaagtgcatatttagagagtggtaaaaaggtgcgcaaaaactttaggtcatgcaagccctcaaatctttcagagacatcaaattctcttgaatgaaatgctaattggcgaacaccttctgagattttattaccttccaagtagccagagttttttccagctactagtctagccaaatcatagatgaggtcatgcatttgaaacttatcctctgcttcagttttgtctttttcaattaaagatctagataacaattcattgaagtagtcttcacctgctaattcctttgctttctctccgtggatttgttgaagaaagccttcagccatccataacagaatcaactccttcctatccaacaaatgttgttttggaaaaattgagcaataagaaaaacatctttttttacaaatattaacaaatttattaagagtgaatcagttttatcaaacttttttctttattttttaaaatcaaattcataatttttattttacatttttcatcactacaaaatataatatttaaattaaataacttttcaaagtaaacaaaaaaaaagcttttgattttatagccacattaaaatagattttgattgcataatgattttacaaaactggaaacaaataaaattaattgtattcaatcaattgcaattttataggtacattaaaatagctttagattttctcaattaattttggcattgcaataatcacagtcctatcttacaagaataagtagtagtcaatcatgatagttaatttaattgaatttacaattatttataaatatttgatcttaactttaacttgttttccttatcctggttgaaatcatttttaataagttcgttaaaaaaaaaatattacgnnnnnnnnnnnnnnnnnnnnnnnnnnnnnnnnnnnnnnnnnnnnnnnnnnnnnnnnnnnnnnnnnnnnnnnnnnnnnnnnnnnnnnnnnnnnnnnnnnnnnnnnnnnnnnnnnnnnnnnnnnnnnnnnnnnnnnnnnnnnnnnnnnnnnnnnnnnnnnnnnnnnnnnnnnnnnnnnnnnnnnnnnnnnnnnnnnnnnnnnnnnnnnnnnnnnnnnnnnnnnnnnnnnnnnnnnnnnnnnnnnnnnnnnnnnnnnnnnnnnnnnnnnnnnnnnnnnnnnnnnnnnnnnnnnnnnnnnnnnnnnnnnnnnnnnnnnnnnnnnnnnnnnnnnnnnnnnnnnnnnnnnnnnnnnnnnnnnnnnnnnnnnnnnnnnnnnnnnnnnnnnnnnnnnnnnnnnnnnnnnnnnnnnnnnnnnnnnnnnnnnnnnnnnnnnnnnnnnnnnnnnnnnnnnnnnnnnnnnnnnnnnnnnnnnnnnnnnnnnnnnnnnnnnnnnnnnnnnnnnnnnnnnnnnnnnnnnnnnnnnnnnnnnnnnnnnnnnnnnnnnnnnnnttcaatttttaagcataattttaaattttattcatttatttaaaatgtgaagtttgtttcattacatgtacatcaaaattataaaaatcaattaatgtttaaaaaaacaaaaaaatataaaaattacatgaatattgagtctcacaaaaaatataaaactaaaaactctaatatcattttttttattgttcattggactcactttttatgtttttttcattatatttatagacttttttatgtcaaatattagttggttccaatagttaaataattaaataatgctaatctataaaattctaatattccaacaccatctcaagaaaggttaatacatagaaaaatggttagcattgttttcaatttatagttgatagtaaaatggttaatttatatttcaagactcaattatttaattcgtcaatattaaaaaaataattaatttaatgtatagcaataaatttgttttaaatttatatctttttcaaaactatcattgtcattaaagtttctttttattttaatgatttgttaatatttttttcttcttttaatgaagtttagtttgaatataaaaataattaataaaaaaaatatgatagattgaattttatgaaaatgaataaaggtcatttcaaacaaatagaaaatgaggaaatatcaatcttataaagttcaattatgaatttgactttacaaaatctcgagcattcttcgttgaaatattatgccaattcaacaatcatacccaaaagtggtccctaaaagtctccagcagtcgattttaaacgtatgaacttaaacaaatggaccatgagtacgttaatgaagtgaacaatgtgttgatgaaaatctcccaaagctctttaatgttaagttaggactttcaaatgtcattgtggtacttggaccttcacttatgatgtcccttgagaagtacttcttcttgatcccatcaaaggttgatttattttagtaacgtttaagatagaccttgaaaataaggaaccaatggagagttttgtgggaatgcctaaaaaaaaagaaaaaaagacagaaaaaactgttaccaatttttaattacatacaaaataaatgttatcaatgtaaaattttaattccagaatttatcctattttttatacaaaaagggttgtgttatgaaatcgtagtgcccagaagatagatttgtaattctcaataccaatgaacgggttcataggaaccttgaacacaatatcatccctgaaaaaaggggacaatatatcagtcaacaaatttagcataacagaccaaagaagacacttgcattaacttaattgtttcatataggaccctctgatattcatattactaaaagagcacatttgatttcatatatatcggagggggtggaaataggtttagggttttacatgtttaaggattgttggaaaaaatgtgtccaaagaccctcaagaagtaccttttgcccctacttcaacctttcagatatagagtgctaaaatatgcatgaccctcattaaactatagtattaggcaaggcaaggagaccatgcaaattacaacaacttactgattctgtttgtataaaaatgtctatgcaaaaaaattaaacacatataataggcattgttcatggatgagaataatcccctacttaattctactgatggatcgtatagttgccaacccttgtggaatataagttagaaaaaaaagattaaagattcggtgtttcttattttttgactggtcaaataatcttcttgattacattaataatgctaaggactcgagctgaaagttgtttaaacaagtgcaaccaccagtggcataaaataaagtgacacaagtcatgatttaattagtaattcagtattaaccaattacaactccaacatactcaaccagacaccaagtaaatgtacctaaaataagacactttatcaccgtccattttgataaccaagaaagggaagtactgctataattaaagggcatacacttttattgttagtgaaattgtagttatcaaaagttcaaaactaccaatatcagaacaggcttcattcacacaatcttcttgcttttagacccacttaattacatccttgtggtttactcattatcatgtaaattacacaggcaaaagaacctaaataatacactttaaataaaaaattaccaaaaaggggctgtttggaaactatttaccaatctggggctgttggtcacgcccagaaccaggcgcgactaggggggtagtcacgcctggttctgggcgtgaccagtcatgcccagttctgggcgtgaccaacttctgccacgtgtcatgcacagatgcaccgatgcgtatataaacttcggacggtcataacttttgactggaatgtccgattcaggcgtagtttgtgtcaaaacgctcgaaattgagaggagaagccctgggcaaatttttgaaggggatttggtcannnnnnnnnnnnnnnnnnnnnnnnnnnnnnnnnnnnnnnnnnnnnnnnnnnnnnnnnnnnnnnnnnnnnnnnnnnnnnnnnnnnnnnnnnnnnnnnnnnnnnnnnnnnnnnnnnnnnnnnnnnnnnnnnnnnnnnnnnnnnnnnnnnnnnnnnnnnnnnnnnnnnnnnnnnnnnnnnnnnnnnnnnnnnnnnnnnnnnnnnnnnnnnnnnnnnnnnnnnnnnnnnnnnnnnnnnnnnnnnnnnnnnnnnnnnnnnnnnnnnnnnnnnnnnnnnnnnnnnnnnnnnnnnnnnnnnnnnnnnnnnnnnnnnnnnnnnnnnnnnnnnnnnnnnnnnnnnnnnnnnnnnnnnnnnnnnnnnnnnnnnnnnnnnnnnnnnnnnnnnnnnnnnnnnnnnnnnnnnnnnnnnnnnnnnnnnnnnnnnnnnnnnnnnnnnnnnnnnnnnnnnnnnnnnnnnnnnnnnnnnnnnnnnnnnnnnnnnnnnnnnnnnnnnnnnnnnnnnnnnnnnnnnnnnnnnnnnnnnnnnnnnnnnnnnnnnnnnnnnnnnnnnnnnnnnnnnnnnnnnnnnnnnnnnnnnnnnnnnnnnnnnnnnnnnnnnnnnnnnnnnnnnnnnnnnnnnnnnnnnnnnnnnnnnnnnnnnnnnnnnnnnnnnnnnnnnnnnnnnnnnnnnnnnnnnnnnnnnnnnnnnnnnnnnnnnnnnnnnnnnnnnnnnnnnnnnnnnnnnnnnnnnnnnnnnnnnnnnnnnnnnnnnnnnnnnnnnnnnnnnnnnnnnnnnnnnnnnnnnnnnnnnnnnnnnnnnnnnnnnnnnnnnnnnnnnnnnnnnnnnnnnnnnnnnnnnnnnnnnnnnnnnnnnnnnnnnnnnnnnnnnnnnnnnnnnnnnnnnnnnnnnnnnnnnnnnnnnnnnnnnnnnnnnnnnnnnnnnnnnnnnnnnnnnnnnnnnnnnnnnnnnnnnnnnnnnnnnnnnnnnnnnnnnnnnnnnnnnnnnnnnnnnnnnnnnnnnnnnnnnnnnnnnnnnnnnnnnnnnnnnnnnnnnnnnnnnnnnnnnnnnnnnnnnnnnnnnnnnnnnnnnnnnnnnnnnnnnnnnnnnnnnnnnnnnnnnnnnnnnnnnnnnnnnnnnnnnnnnnnnnnnnnnnnnnnnnnnnnnnnnnnnnnnnnnnnnnnnnnnnnnnnnnnnnnnnnnnnnnnnnnnnnnnnnnnnnnnnnnnnnnnnnnnnngactacccccctagtcgcgcctggttctgggcgtgaccagtcatgcccagttctgggcgtgaccaacaaccccagattggtaaatagtttccaaacagcccctttttggtaattttttatttaaagtgtattatttaggttcttttgccaaattacacaaaatcagtcccccatgcctctatgatatctaacgttaaagattaagatagagaagtctaagggcataacgtgcaacagcactatcttattgtgataagaatgttggctggaatttgttaaaaaatcacaaaattgtgtgaatctcactccttattttatgaatctcacttataattttctaacttttaataaattttaatcaacaataagaaagagtgtgttgctagcggtcctctttgatgaatgagagcagtaagtctagatcattggatcttgcatgaatggtaaaggttacatgaccacttagaagattcatacaacttcgtaaagagaatgctctcccttgataacagtcaagccatataaagcaaagcgtttaattttataaagatttttacaatataggccaattgaaaatcatatagatatgacttctacactaaaaatcatcctagatattaactaattaaatttcatgcactatcacactaaagattttcacactgccaatcaatcattcatcatcataaaagtccaacaaaaatacaatacatgacaatacgtgattagatgatagggtaaaatctttacacagtcagtcacttcgaattgaaatttaaaataattattacagaaatcaacaatcttagtatatacgacaatattcacttagtacattctaattgaattttaaagtaaaatacaacaatatgtaattccaataattgagcaataatcacagcatatgtgactggggggaaaatcatgaaccatccacaaaaagcattaccaaagcatcactaattttacacattccccttctacactcaacaaaacatattaaacacaaacaattaaagtaaaattaagttaaaaactgaagttgaattctacaattgaagtaaaattagtgagtatttttaaatcttatgctgcaaaggaaagatccannnnnnnnnncagcacctcagcaaccatctgtatcaacatttccaaatcaatattatcaataagaattgtgcaacattgtattaattccaaacgaattccagattctagcatagataacaatcaatattatctaccatttgagtttgtaaacaaaatatttgatggaatttctaattttttcatcaaaaaagaaaataagataagaaagatggattccatcattttacttccttaacattaatttgcctcactaatccatcacaccaattacaccactccgtatctactagtaaacacaaaagaactaatatcctgtgtannnnnnnnnnactggggggaaaatcatgaaccatccacaaaaagcattaccaaagcatcactaattttacacattccccttctacactcaacaaaacatattaaacacaaacaattaaagtaaaattaagttaaaaactgaagttgaattctacaattgaagtaaaattagtgagtatttttaaatcttatgctgcaaaggaaagatccaccgaaagaaagttaagagtgtaaattgatttgagaaacaaatttaaagcacacatgataaagtcaagattcaaggaaattagatgctataaaagacaatccttaattatgatcataaattaataaaaaccactgaagataaggacagatgcagagacttacgaaggcaaatccatcggttttgtatgttggtccaacaatctgatactttttgcagccatatttatcaaaaacagcagcaactcctccactgttgcttccaggagacagggcatgttcataggcctcagggccttgataaccctttaacttagagtcattgaatcctagctttttctattagtaaccctttcacaaaggaatcctgaggatatcccacaaagtaattgtttgtttttatctcttctccgtccacaaacacaggctgcagtttctgtaccgtgagaattgaagctaaacttgcagtgtgactttgtgttatgatgagtaccacaaagaaccatataatcagcacaaatcgtgaccaattgttctctaccctctcccctgccaacataggttttaagttaaaaaagtagaacttaaaaacagaggtttttttctttatttcatgaagaaatttagaaggcatattactaatgctttcttgaatatttccaagtaagaaggaatcaaactatcatgattgaccgagagtcatgacaatttggttctttggagtgcccctgagtgttagtggtgttcaaaaaaccaaacgatgaaaccaatgaagattaaagctgcaccaatcgtcaaccaaaggtcccaactaaatggcttcaggagaatccaaatgctttgtttctcattatgctttgccaaaaccaacattgtcacacctgattctgaaaatggcattgtaaaatcaacatactttgagggcttagtcacaattgtcacgtccccaaccacagcatcatacttctgcatacagaagaatgaagcgctaaggaataaaataaaaactttccttatcttatggaacaagacaataggttggtcctgagatttttatgtcctgagatttttttatgtcctcgaccaaccaaaaaaattgtattctcataatcatttaaattttgtctttcttataactttttttttcaaagtcgctaatacttcgtttttaattaagatttttagaaacatattttcaatagaaatcaaaacaaaattatttaatattaatatgaactaaataaaaaaggtttaattactattctggtcttataatttatttttaggttcattttgttacttttattattaaaaggttgaattaagttttctaatttttaaaaatgatttaatttgtttactttttaaaaaattgattaagtcattttatttttaaaaattaattcaatttgatattttttttagttgctccaaaaaaaattgaaaaaggagactgaatttgttttataatgagatcagaatttattttaaaaaataagaaacctaattgaattatttttaataattataggatctaattaaatattttaatattaagaaaattaaattagagaataaaaaatataattaaacttaaaataattgtgtgcctctaataaggacactctagaaagtggctcacctgaaccgtactcatgcccaaaaaaattaagaaacaataaataaaggaagctttgataaagagaaaacttacattttccttaatttgcataagaagttcgtcgtaggtaccagcactctgtcgctgtcctgtctcgacactcacaagttgcaacgatggttacgctttagcaaggctcgcattctctctcgcgatcgttttctcgctctctctctctctctttttctctcctgattgatcgcttctctctctctctcacggtgacttgtccaggtatgctctctcgctctctcatctatgtgatcaaggtttttcttcttgattttgtttgcttgtgtttcaattttattgtttgatttcattagttaatttgcatttcatctcttttgtttaggatttttttgttgtattttcacgaaacatcgttggatttgcatgtgtttgtttgattttattgttgattatgaatgcaatcagtatttagtttgtaatattctcgtttgcatgattgtttggaaccagccactggtgagtctgattgcttatttgttctgcttttttcttctttcactttgcatctgaaccaatcaatggtgaaaaagcattctgttttcactttatagcatatatcagatagctatttaacacctgttttgaacaacaaagcctgttttgaacaacaaagcttgtttgtttgcatattaatcatagggtttctaggttccgttttctactctgtttgatttcgttgtcttggtacctgcaattcattcttttgtttgagacttagaggttgaaggtgcattttaaagaaatatttgggagctgatttcgttgattgatcgaggttacatgaacaattcgttgataatatatacaatagagattttgcagcatggtgcctacaattgtggagaaaattcaagcagtttcatgaacttggaatcacatttatagggtgtctttatcccttgttgctttttttttttttgttttgagaaatgtatcaatgcaccaaggcaacatctaatccttcattgagcacctaaaccagccaaatgatgatgtgaagtgtagattctgcatggttatgcagaattcttacaagttgctccattaataagcccattggaagccatcattgatcaatttatgtgctttgggcgtatgaattgttactaacctgttcgctgatgcttaggggtagaaacaaatagaacatagtcatgctagagatgactcaaatgttctactttacaacattttttttcttctgtttaattagaagtacttagacatatcaccataataatgtgtaattggaaattgattttgattttgattattattacaaataaaaatgtttaccctttagcattttgcgagttaggtatgtgagattttggaattctggttaggctagaagtggatccaattgaatctcaaggagggatttgattttttttgggtgactgatagcaaaatatgtaactgagtatagttacttacacatgcacttgctaaaaggcttacaagaaaatttaatgattgaatcaccattgagatcttgtgttttggctcagtagtttattgactttattgatttagagcttgttcaatcatacttggccgaaaaaaagaatttaccttttgattttggagtcatatgactcattatgttgatcatattaataataatacaccattcacctctgcatggattgaatctcttagatactgaccacttccgtttcgtcctaagttttgtttgtttggtattctttgcctcctacttttgttagtttgcaacatttttagaaatatggttgtaccatcagtcgcaactcttccttaatcccaatgatttactcttaagtgccaaacaaagccatcctttatacattttctattactacttccagttccagagactttgacataaatctgatctctctttttatttgaacaaaatcagaatacatctctaattcactggtttagtatttttattttttattcgtaaattgatgagtaatccaagccttcatttactcgtttgctgatttaaatatttattatacataatattgatcaatgcttgtactcctgcctaggaccaatgttgtcaaactcgaggatcggaatggggataaaagatcgtaactcgaggatcgtaactccgatcgtaagagttacatgtataatgtaaaattatattatatattcgtatataactaatattatttaattaagaaaaatttatccataatttcatactcaaaaattcaaaataagaattaaagtattaaaattgataacacaagtaaaatgtattaataataaaaaaagagtgtaacaaacacttcaattaaaacaagtccaaattttaataaacaaaataagcgaaaaacctatttcgaaaggtaaaatagaaactgcataaagcagtgaaaggggtgcagaaagtaacattaattataaggcccatattaggcccaaattgctttaccctaatgttcactaatccacggcagctgcgcagctttgtgaacacttactctttcttctctatagctttcgtcttcttctatgcttattcatccttctctcttcaacatatgggatgaaaacgaagaaggaaactcacgcaccagcggcggcaacgaggaacagcaatgatgagcagcgagtcagcgacgagcagcggtggcaagcagtaacggtgatgagcagcagtgacaaacaaaagaggcacagtcgcgtagaccgcggcggcgataaggctgagtagcagagacgaaaaagaggcgcggaccatagaggagagcttctgagaatcgaaagcctcgatcactaatcgaaactaaagagtaagccatttttgggttttttttctttctccaactgaaagatcgatacggatcgccgatccatgaaaaactcgagcaagatcgcgatccgccaacgatccctggtgtgctcgatcctcctgccgagttagcattgggaacctcctggagatcgcaagatcatacgagtatagtgtatgaagtaacaatgtgttgccctcttatcattatctaggttgtttagttatcgagagaatatgagagttgtacaactaatgatttatgcgttcaaagtttcaatttatagttgtccttgtaaaaatattgaatagttagaaatcatatgctttgctaaaattataaattgttatctcacttatttgtatgtacttcttttacctcttttcacgattttatttactgaatttattttctcatgatttgatttgtatcatgaatatttataaatttataaatgaagattcttatatggtggtgcttgtaaattctctatatctatgtttttgaattattattaaaattattttgaattatgatatatttaaaaattagttaatatttattttcaattaagttcaatattgaaattttaatatttaaatatttaaaaacaatattttacgtagagannnnnnnnnnattattgtgatgtgatttagcatatctaaatctactgtatattgtcagaaaaggacaagctttgcagttcaactggttatatatatgagaaaggagcctttgtctgggattctgaaggcacaatctctgttgattttaccaaggtattattgcttcaaaatcttcgtttctatattggtccctccatcttgagtttgtttgaccctaagatgagtgatattaattaaatttctgttcctcgagattgaatcagcagttgaaagcctggtagggagatactcaccatacaagccaaaggtgataaagaggctgctggtttgcttctctagaaatactgtgtgttgactgaaccgctgaaaatttctctaaaaaagttggacaatattcaggtataaatcattacaccacagtactgttggctgtgataagacgatgagtgcattgtactgcttaatgaggcttnnnnnnnnnnataaatttataaatgaagattcttatatggtggtgcttgtaaattctctatatctatgtttttgaattattattaaaattattttgaattatgatatatttaaaaattagttaatatttattttcaattaagttcaatattgaaattttaatatttaaatatttaaaaacaatattttacgtagagagaaaattcaattactttatccaaacaagtaaattgaaatacaaagaatttgaaatgctttatccaaacaaattacttgtaaaatgaagggaatttaattacaagtaattcaaatgctatgtattttaattttcttaaattgctagaattctccatccaaacacatggtcaaggtttcaaagaacacatcaaaggaggagctgaggaatttcttgaatttattgacattgtttgttgttgggattccaatcctcaactttgttagtagctctgttgtgttacctggccattttggttactctaatttagaaaaccctatctttgccttccaaattccaatactcctccctatttgtttcacaacattgaacacttcaagaattgattgctctagttgtcctttaaccaaatggaaattaccagagaggctatggaattgtgtagccatgattgtattgtgaagggtggtagtagtgactttttattttttgtctaggagagagtatttcgctaatgtccaaacagaatcataagcccacaatctaaagatggttacattggttctatatcttgggttttgctacatacattatatatatttctaatacattatatgtgagcagtgtgcggacgaaaatatctttcgcgatttgaaggttatgaatttcgtaaccttcatacggattgacgaattcctaataaccttacgaattcgtcaatccgtatgagttttttttttacggattgggcaatccgtaagattttttctcttatggattgggtccaatccataagtgtttttttactgattttccaatttgtatgtgtttttttttacggattggacaatccgtaagttttttttctcttacggactggggattttttttttacagattgtccaatccatatgttcgaacctaaaaccttcacgttattaacgtgatgctcaaaccaactgagctaatttgtcaattatgataaaaaataattaatgttgatacatataacaccaacttttttactgtatatctcatacacatataattttacataataaattttgtaataattaattttttttacataattttggtctaattttacataaaaaacttttaattattagatcaaaattaattgttacaaaatttattatgtaaaattatatgtgtattaaatatacattaaaaaagttggtgttatatgtatcaacattaattattttctaacataattgatctattagcttagttgatttgagcatcacgttaataacgtgaaggtctcagacctgcttgtgccattattttaaattattacgtaaaatatattttaacttatgaaaaaaacacatacagattgggcaatccataaaaaaaacactattgattgacaatccgaaaaaaaaaaaacttaaatatgtaagttccataacctttaaatcacgaaggatattttcgttcgtacactgttcacatatagtgtattagaaatatatatatatagtgtatgtagcaaaacccccatatatttctttgaagttgtctagccttttagtgtgttttgggctcggcctaactcctaacacaccttgcatggtccccatgcatttgggtttttcttctcgtacccaacaaaactcaaatacttcattctttttttctttaatttcaagattgtccttttgtgcttctttttccttctttctgttttcaactttttcttacttcgttgagctcctccttctattagctcgtgatggtttgttagctgcattgtgacgggggtttgttccctatattgactttgtcgtcgtcatcatcagtgttgcagtaagttttttcacatctgtaaaatgctgatatgtatgagccatatggattgtcaatctgtatggaccatacggatcgtcaatccgtataatcatttacttcttttaaaaaattataagctattttttaaaaaaatagttaaataacaaaaataggtcatattgtagaaaaaatgttatttattaatatatttgtataaatattattacattaataacattaaatatttttataaatagttctttcaagtctagaaaatttcaaaataaattttcacattgatttttaaatatataatagtattaaaacatttatttataatatatttaaaataataatcaaatatggaaattaagatataaatcattatatatatatataatatgcttatccatttcaatgtaatatattactatattagtatatatttgaatagtcatttttatatttttttagtaataaaaaaaaccaaattgtatgtatacacgaaaagattccatgtacaaaaaaaaaataataaaattgtgtcatactatatatgtctttctttgagtgtctttgcgctatttgttactatgaaatagtggaatgcttgtttctatgggatgttgttgttttctattgattcaatcaaaaggaaaacaaatcatggtcttagaaaggagttttagacctttgtaaggttattatgttaatgatgagtgacccaactgatatttaatcgtatcgattccaaggttttgattccattcttgttgatggtcctttgttggtaggtcatggtgaaaggtatcattgtaaaccttatatagggttattacttattacatgttttgtctttacataaagcgacatcaaacttcttccacaagaaaaagaaaccaatttaaacaatcagcaagatcttgaattaataagttttatcttcaatatatatccaattcaaattttgttatatagtaaaaaaaacataattaacatataaaattataagagcaaaattaactctcgtgcttaacttgtttttattattagggattgatactcaaagaaaattgtcctgttggagaagtgtgctttggcagccagctagaggaatgtttcttctttaagcaatggtttgttaccatagaaaatggaacaaactgatagaatgaaaatacaattaagattacaattagatcaaagaaaaataaacaaaaaaatacaattaattctcacaaaatcaacaaaaaaatttaagatcattcttattgatgttctgttaacaacatgctaatatgaaactatgcacaatttgttcatacaacattttgtgctagattagcggggttattcaacattgttttatatggtttgtccttgtaaaagccatgttgtaccaaattaaggagtgagtattagtgtgggagaggaagtgcaaagagttcttcaaaatactccttgtgtaatcaagttgattataacacccaaaaaaatcaaataaaaataaaagaattagatggccaatgttaaaagaatttgataccacatttaagtaaagcttctaatgccgaaatggtgggttgctagatgatattgattttgaaaggagctacaaactatcattttacatattttttttcttgtatcataaatatgtgtttaatttgttacacttttattagttggttttttttatagtcaaaaaccaaaatttataatctaacttattgacattaattccccacaatcatagttgtgaaactaggtctagtcattcacccgatcgagatagtggaccagtggtccaacaagtaggccagtaattagcctgatttgacccgatatattaagaatttaaaattatatatgcatctattatatataaatatataactaacattatttgagaaaaaaaagttcatccacgctccaaaatgcaaattaaaaaaaatatcaaccagatcgaaccggtccaaccaagatccagtgatcaacctggctgaatttgacctggtcaactattatcgatattgacctgattaggtcaccgggtcccgatccgatcggccagtccagatcgaatttgataacaatgcccgtaactacatatatacacacacataatctatcacttcattcacatacaagcttgcactataatcagaacattttaaaataattattcaacttggagaatataaggacaaatgaacatggttaacttacaatttaatacaaagaaaaataggtatcaaatatcaatcatcatccagcgatccaacacaaaatccaattactgatatgcataaacttggatggtcccacaccataataaatataatccaatacattatggttttacaaagatagtttcactccagaaaaatcaaataatagaacattaacattaacaaatcacaacaataaaatatcttttgcttgtcaaaaacataaaattaaaaaagcatcaacagactacatacaacaggtttatttgtaccaattacaaatgttataaaggaaatttctagtgttgggttcagatgattcaatagaaaccatcccactgatgaagaaagaaaagtgacaacttgattgaaatgatcaccaaatattgcgttcccagcacctcagcaaccatctgtatcaacatttccaaatcaatattatcaataagaattgtgcaacattgtattaattccaaacgaattccagattctagcatagataacaatcaatattatctaccatttgagtttgtaaacaaaatatttgatggaatttctaattttttcatcaaaaaagaaaataagataagaaagatggattccatcattttacttccttaacattaatttgcctcactaatccatcacaccaattacaccactccgtatctactagtaaacacaaaagaactaatatcctgtgtannnnnnnnnntctaatcaaacatattaaaatgtatccttttaacaaatgaaaacaaatttaaacaaaatataccactataccaacaagcatctaaattaagaaaccatgtatgtatcatttattgtaatttccacaccactcataatttaggtgaatgaatcattttcattacaataaatgatacatgcacctaaattaccatgtagggttgagctgacaatatagagttattaatgttatcaaggctagtttgcaatatttgaatatcaatcattttgtgaacctagtgtctgatcaagaatatcatacgcttttggcattagtatataacctagaagggttatacattaaattaattatcttaatttctgttttacataatcttttttcacatattagaggtcttttaactaggtattcttatatgcatacaacaacaataggtgtatattgtatatagtagttttttgttccataaacgttgtctatatacatgctgaaaactttttgccagaacgaaattaactggtgcagaggaggagagtaaagctgatctatgtgggagcagggatcagaaagttacaacacggaaaaccccatccttcaaaggtgatgtaattaatttttccattgcagggtttgttagttaattataagtagtaaaaggcaagaaagaatatcatcaggaaagagctgagaatttgggatattgtgccacatctttaacaatcacatgtctctgattttgtcctctttacatgtcctccaacaaaaaattaataacaatttaaaagtaatattctctcttattcgttaactgttttaagttgaagggttgtttttaattagaacaggaaatgccacatgaaattgggactaggtgatttaataccatctttaactaagttaagagacaaaaaggagggagaaaaaaaataacatattaaagtnnnnnnnnnnaacaggaaatgccacatgaaattgggactaggtgatttaataccatctttaactaagttaagggacaaaaaggagggagaaaaaaaataacatattaaagtttatatatatatatatatatatatatataatcttaattacaaccagaaattggtttctggattatgaaagagagattcttacatcctagggctcaaagaacttattggctattgtacatttactaatttacatagttgatgtgacaaactatgagtatcattaataattaaacaagaaaagtattgagtaaaaaaaagcaatactttataaaatgaaacatacaatttataaaggggagcatataagaacttccaagtgaaattgtgaacactttgatgaggctgttaaaagaattagccaatctgttaattaacaacctctagtgaaaattttctacagataagaaaaaggctcagaattggtttcagagacaattttcaagaagcatgagtcatgattatgatgcagaaatggagcatgccacaacagtagctgctgctgcattcgcaatttttttcacaagaggtttcacaaattccacaacaaaagaaaatgagggagaaaactttgcccaggggcaaaagcaagatggatgatccaaaacctccgatttctcagtttggtagcacatcaaggtagttctcaggtaattaaaaacatgaacacaaaactaatccaagggttgatataatggtgtaagacctcgctttgtttatataaggaagaacgatctagtttgcagaaaaatctgtgttcaatatgcaaaatttccttgaaccaatgacaatcacacatctaaatgagattaatttctaatctaaggaaaaaaaaaaagacatgaacacaaaacatcagtcataataatacaagtaaattacatttacacctcattttttttagattacacaaaatcttcctatcttttctatccctattttaatctttttaattgttttaaaaaattatacagacacctattaacctctttaattatttgaaaaacactacagtgtcttcgacattactgtaaaagttaaaaaaaaggggaaaagtctatgaaatttcacaaaaatcccaaggaatatcagtataatttactctaataatttatagtctcttcgacacaattgacaccattatgatgaattgcatctgcaatgcttcacatgcaggatcattgaaactcccaaatgaaaaaattaacaatgctacagtggatccaaagaggcctgaaaaggccatgaccataccatcaatgaggaggagttcaagttttggtgaaaaggtgaaaagtagcactgatggtaaaaaaacatgagatccaagcccccaaaaggactccaacttttggtgatgacgacttggtccacactggtgaaataaaacctgagaccacacaattacctagagttcctccaccatcagcaaatgcctttaaagccgccgccacctccattgccaccatcaccaccgccaccgatcaggcagacttcaggtgaacaaaatagtataaaatctctacttttataattttctaaaaataaaaaattatttgattttatctactgtgtagagataatttagtatcaaagtatggggttgatggactaataatgggttattgaaaaaaaactaacgnnnnnnnnnnnnnnncaagtctttataatgttgtgtatagtaaagaggcgggaaaaataaaaaagataaaaaaatgaaaattaaaaaaagagattaaatattttaattgtagtggttaggaaataagaaaaaaaatacaaatttaccaaaattccattttacccagacacaaaaaaatatttccagtgactttttgatatgaaaacattttttttatataatttaaagacatataatcggttatgcaatgcaatggcataatcgattatatggctcgtttaatttgtttgctggattgaaggcaattaaataatagattatgtaatgtaagcatccaaaagattatgtaaagttgctttgctgaaagcataaagtaactttgaccagccagagcttaatggaccaatttccatgaatccaattatttctgctgcttctgttattgctgctgggttggcgtagggattgcttctattggacctggggttggtcaaggcattgttgtagggcaagctgtagaagggattgcacgacaatcggaagcatagggaaaaatacgaggtactttattgcttagtctggcttttatggaagctttaacaatttatggactgagcttaatggaccaatttctggtgcaattaaggttgaagcatatctgtgaaaccatttattgcatatggataccatgttctcggttgatgctaaattattttgcactatcatgaataagctaatataaatcattccacagtctaaattcactggaaacttgctagcattatccctcttgaaaagacctataatgctatctttaacttgtgaatcagtattagtgaatggggcctcttcaatatcttatttttctaaatggatattttgtgaacctgttaattcttaacaggtttaagcatattattcttcctatagctgctgcctgtgttgcaaaggagaaactagaacatgtagattttgaatcattctctacgcatacaatttgccatgaatgctgccatggaattggaccacataccatagcacttccaaatggccaaaagtccactgtcagattggtcagttccacaatatacttcagttaagcaatttctttgattgctaaaatttttgcagtaaacttactgtcagtatgaccattaaattcattgtcattgttgttattattattttttttaaaaaaaagttattggttaaaatctgaaccaattattctctatttattgtacagtggtttaaggcagtcatatctgatttagaggaaacaaaatctcctataattatgtgtatctcttgtaaatttgtaactatacaaaccaatctccatagtatcttaaaaatgctgttccagcatctctatttgaataaaatatattacttacaaatggctgtatcattccttttgatacaggaactacaagaattttactcggcactggaagaagcaaaggctgatatagttggcctttgggcattgaggttcttaatatcccaggttagttattatactcttttttttattctctgtcagggatgaaatattaatttattgaaggaaaggttaaaatacatggcatgaggatcaggagtcatcctaaaacagggaaagcctgtaaaaggaacatgaaaagaaaaaaaaagtcaaccatcagcttgactatgctctaaatatctttaaatttataagaaacaaatcccctgaaaaatccatggtagacagtagtttcttaaaattcttatggttcactcaagcctgtaatgttgtgtttgacttcatacattttctagacattatgttgttttgaggctcactactgatgctaatgtcattgactgtctctgattttaccaggattttctttctgatagtttattgaagtccatgtatgattcctttcttgttggatacttccggtcagtacgttttggtttagaagaagctcatggggcgctgctagctgtgcatacttctttcatctcatgtttattattgtgatgtgatttagcatatctaaatctactgtatattgtcagaaaaggacaagctttgcagttcaactggttatatatatgagaaaggagcctttgtctgggattctgaaggcacaatctctgttgattttaccaaggtattattgcttcaaaatcttcgtttctatattggtccctccatcttgagtttgtttgaccctaagatgagtgatattaattaaatttctgttcctcgagattgaatcagcagttgaaagcctggtagggagatactcaccatacaagccaaaggtgataaagaggctgctggtttgcttctctagaaatactgtgtgttgactgaaccgctgaaaatttctctaaaaaagttggacaatattcaggtataaatcattacaccacagtactgttggctgtgataagacgatgagtgcattgtactgcttaatgaggcttagttccaatataacagtttttcacattacaaaacctgaattacttgtctaaattagcatttacttagggcccacatttccaaaacacctgagtgtcaattgaagaccatttttaattatttaatatattttagcttctcatatttttaagactcgttaaaaggttgtctcaaatttctgtacttgttacatatctgcctaaaaacgtcagtcaatgttagtgttttgaaagatgtttctttaagctattgcacaacatgcactcattcgtaacatactcttctacaagtcattggataataatgtgttcctgttgttaactttcttgagcagtcctaattatgctcatatgtgtgcacaattaatctcccttggataaatttcccatgtctgaagtctcccaatacactattctttcatacaaactgtgattcaaaaatgttacaaaaactaattatgtatatattgtattgtgtaccctaggtacctgttgatgtagctctgacctttcccattgccaacaaaatattgcagtggaaccaagcgaaccaatgtgcaaaagtttttcaatgttgccatcgtacgttgtgtcagtcaggaaaatttattcaatgagtgtctttgagctagttgttaatatgaaacagtggaatgcttgtttctttgggatgttgcttttttctgttgattgattcaaaaggaaaacaaatcatggtcttaggaaggagttttagaccttggttattatgctatcgatgagtgacccaattgatattgaatcttatcgattccaaggttttgatttcattcttgttgatggtcctttgttggtaggtcattgtgaaagatatcattgtaaaccttatatagggttattacttattacatgttttgatctttaaatagagtaacatcaaatttcttctactagaaaaagaaatcaagttaaacaataagcaatatcttgaattaattagctttatctttaatatatatcctattcaaattttgttatctattaaaaaacataattaacatttgaaattattagagcaaaatccactgtcatgcttaagttgtttttattgttagggattggtacccaaagaagattgccctgttggagaagttgttttggcaattagctagaggaacgtttcttctttaaccaatggtttgttaccatagaaaatggaacaaactgatagaatgaaaaatacaactaagattacaattgaatccaagaaaaatcaactaaaaaatataattaattcttacaaaatcaacaaaaaatttaagatcattctcattgaggttctgttaacaacatgctaatatgaaactatgaacaatttgttcatacaatattctgtgctaaattagttgggttattcaacattgttttatatggattgtgcttgtaaaagtgatgctgtaccaaattaaggagtgagtattagtgtgggagaggaagtgcaaagagtacttgagaatactccttgtgtaacaagttgattatagtaaaaaaaaaatcaaataaaaataaaagaatttgatgaccaatgttaaaagaatttgataccacatttaagtaaagattctaatgctgaaaagcatgggttgctagatgatattgattttgaaaggagctacaaactatcattttacattttttttttcttgtatcataaatatatgcttaatttgttaacttttattaggattttttatagtcaaaaatcagattttataatctaacttattgacattgtttcccgtaactatatatatatatatatatatatatatatatatatatataannnnnnnnnnnnnnnnnnnnnnnttaaccatgtaagagttccaagactatcgagttagcaaggctataccaaaatctcaaatgtagcagtaaaaaacataatttatcacttcattcacttgcaagcttgcactataatcagaacattttaaaataattatccaacttggagaatataaggacaaatgaatagggttaacttacaattcaataaaaagaaaacataggtgttaatcatcatccaacgatccaaaacaaaatccaattactgatatacataaacttggatggtcccacaccataataaatataatccaatacattctggttttacaaagatagttttagaaaactagataatagaacattaacatcaacaaatcacaacaataaaatatcttttacttgtcaaaaacatttaaaaaaaacatcaacaaacatgtttatttgtaccaattgcaaatgttaaagaggaaatttctagtgttgggttcagatgatttaatagaaaccatccactggtgaagaaaaaaagtgacaacttgattgaaatggtcaccaaacattccttgcccagcacctcagcaaccatctgtatcaacattttcaaatcaatattatcaataagaattgtgcaatactattaattcaaaacaaattccaaattctagcatagacaacaatcaatattatctaccatttgagtttgtaaacaaaacatttgatggatttctatttttttttcaaaaaagaaaaataagattagaaagatggatttcatcattttacttccttaacattaatttgcctcaataatccatcacaccaattacgtacaccactcagtatctactagtaaacacaaaagaactaatatcctgtgtagaacaagactaagtatatgccataaacactaagtcagaaataaaatcaacaaaaggcaatctctaatcaaacatattaaaatgaatccttttaacaaatgaaaacaaaatattaaaaggttcttatactctactataccaacaatataaagtttaattatttaaacatgttccaagttgaaaagtaaatcctggaaactatcaaaaattataaaagggttaaatatataaatatagacatgtttatgtttagtatttaaaaaataactcatctaattttattccatccgtttttgaaatatgtaatttgtagtccctatttttcaaaaaatagtctctttttaatctctaacatatagaaataggaaccacacaacacatttccacaagattaaaatgtgactttatagtccaactcttggacaatccttccaaaaaaaaaataaaactcttggccaactattaagaattcacaaaatttaataaatggttcttcaatactattcattcaattaaacccatgttacttatttaaatgtcaaataaaattaaactccatgatgcaaagtaccacagttaaacttataaataagaatataatgaccacattaaaatttgaaatcatgaagtagaaataaaaatagaatgagcacactatactttctcataataattgaagccttcttttaccttctggatggttcctacttcctactcatgccacaggtcatattatcacttcatcatttatcttgatcgcaggaatgtgagcaatcttagaccagtgtttccctttccgactttgataccttgcttctagtaaaggacaaccacgtatctgcagtaattcgagagaggatggaagctgatctacgggcaaggactcgaggcttttacaattcctgatgccaagatctctgagggaagtgagatgttggagcccttttccttccaacaactttaaatcatcaaaataccatagggacagatgttgcagcgaagtgggcagtaagcactccttcaacagggtgttaacaacatcttcctccccataaccacgaatgaaaagaccagacagagaagtgaggcgttggaataggaaacctaactcgtgtttagacattgatgatagcattccaacttcaacatcaagtgtttctaaactggaaggtaaacaccttgggggcaatgatgttagctctggaagcccagaaagccataaccatccaagggcagggagatcaatctgttctggaagtgacctaagtttcttacaattccaaacatgaagatgagttaatttgagagcattcgttccaccttgagtagtaattgcttccatgttgggacattcgacgattgcaagagtttctagggaagagaaaccatctaatgggaaggacgccagggaatggcagcttttgtaaattgacagaaatacaagtgatgtgtatttgtggcatgattcgggagacagcaattctaagttctcacagttcataatttcaagatcttgcaatgacgttggcaagccatcagctgggaaggaaatcaaattggggatatccctaagagtcaacctatggagacaattggcagctagtatcattcttggcaaagatgacaagctgtcacatttttcaatccctagattcctataagaaaagttgtcaagcaaggacaacaagtcttctcctgcttctctaaacgttatttcttcaattgatgtgttccaatgtagatcatgtgattttgcctctagccggttgcactctgatatacgaacctctgtcaacgaaggtagatggttgggcaagtttcctctcaacttggggcattttgataaacacagacgcttaaggcaaggaaaaggaaacttgctgccttcaccttcaaatggtagccactcttcccactctgacatctcttcgaactggatactctccaacaatggaaatggttgaaatgaaagggaaaccccattgttgcagtagaattcttcaccaactgtcttcaccattttcatcctttttatcacaagctccttgagagaaggtaatcgtccaaatggtggaagtgaaaagcaatagttgcaatcagtgatgcaaaggactataacataagaatatgaagagtcacccaaccatttaggaaagcttgtgccactgtagtatcttatgctaagtttctttaaatttgtcgatggttgcaggttctgaagtacatctttctcaacttgtgaatcttgtggctcactgccccactccagcgtaagctcctcaatatgctctttcttctttaagtcagcttgaaaagcatccttgggatcaacaacattttgtagtctcaaaatagaaagcgtaccttgcaagtaaggaaactttcttaattctctgatatttactccatcttctctgcctacaacaaaagaagtcaagacacggagatcttgtagcttgcttatttgtgctggcatctccgacaaatttgtgtctctaatatcaaggtggcgtagattgaccaaatttcctatctgttcaggcagctgagtaagacatatacaatttgacaatttcaaagtctgtaaattgtaaagcctaaaggttgcatcggacaaccttttgattgaagtataggaaaggtcaagatacctcaaaagcaccaaattgcttattgaatcaggcaactcagtgatatttccatagtcaagcaaggacaaagttcgcaaatattttagttttggtaaccaatcatgtgacacctttttggttacatgacaataatagccaggtccatatttagagaatggtaaaaaggtgcgcaaagactttaggtcatacaagccctcaaatctttcagagacgtcaaatcgtcttgaatgaaatgctaattggcgaacacctcctgagattttattaccttccaagtagcaagagttttttccagctattagtctagccaaatcatagatgaggtcatgcattcgaaacttatcctctgcttgagttttgtctttttcaactaaagatcttgataataattcattaaagtagtcatcacctgctaattccattgctttctctccatggatttgttgaagaaagccttcagccatccataacagaatcaactccttcctatccaacaaatgttgttttggaaaaattgagcaataagaaaaacatcttttcaaatgtgctgggagatgaagataacttatgtgtaaagctggtaacacctcttcatgtgcccataagttgctgttcagaatcctattccattcttttgcatcaacatttgatcgcaaaagacctcccaatgttttagcagctaaaggtaggccattgcatttttttgcaatcttcctaccaatttcttctaggattggatgttcatcgtaaccttcattgccaaatgcatgttcagcaagtatacaccaacaactgtcatctgttagatgtttcagctcataaacgggatatgtatgtgtcatttgtgcaactttctgttgtcgagttgtcacaataatcttacttcccttttttccaccgctaaaaggtgctattaggtgatgccaatcattatacttttcgttccaaaggtcatcaaggacaagcaaaaactttttatctttcaagctgttcttcaactcaacacgaagagcatcaaaattagtactattacaatttttagaagtgacagattcaacaattgtctttgtcaccctaaacacatcaaaatcatcagatacccatgcccatgtggtcaaatcaaaatgtttctgcactgcactatcattataaaggcattgagctaaggttgtttttcctagaccacccatgcccaatattgttagcacttctatgttattattcttctcatcttcatcagagagaagtatgctcagtagcttctctttgtcatcctcccttgcaacaacaacggattcaaccaatgaatctgtaactgttttgtgggagactttcctaaaaacactttgctaaccaagaatatctatttgtttcataaaatgttctagccttccagatattgcttcaagcttggaattcatgctcctatagaattgattaaagggagaagaaagtgatgaccacacctggctagtaaaggttttaaattctccctccaccttgcacctcagagaatctgtgttgatttcgtccatcaaatcctctgcgtctaaaacagcatctttcaactcatcaagccatgccttcactgctgaattagtgatctgtttctcctcagcatcattgagcacagtattgagtgccaacagctttatcttcagctcatccaagagagaaactttgaggtttctgttggcaaagaaattgcgaaactctgtagaagttatcttatccagcaagatctccacagaagcagagataagtgcctctcccaccatagctaaggccatttcttctctagttttgcaaatagtatcagatctctgaagctttagtcaaacgctgaaggtgatatggtagctgctgaggaattaaggtattataatataaacgcgttaaccactttcttttttatcataaataaatattttatttgcctctgtcgttgagaaaaccaagaatagtacaatagtttatttcctttaatgtgaccatccaacgactctgcatttggactttttcaatgtatacttcttcggtccttcctgatttcttctgcctatgaagtgtaataatacagtgaattttagcaaaaaaaaaacttaaataagagttaagtatacatttttctgaatttctaaaacttgacacctccctatttcctcaattcgtttgtttaatgcttttaaatcagcattcatgatttcatgttcaattatgcaatattatttgcttagtatatatcttagatgcgatatatcatttactctcttaaactttcttaaacgacctacactatggtgcatgtaattaatttgttgttgagagagttagattccctactcttttgtctttaattgattcggaatccttataagaaatgctatgannnnnnnnnnnnnatgctatgagattaactcttaagaattgaaacattgcttacaaagtttgctgggtgtagtcaattttcactttgacaaagtttgtattaggtagttgaaagtttcactcttccaattaaaggaatcaaatttttagaataattaattattacgtgtattcttttaaaatgattttttttataaaaaaaaaaacaattacactttaaaatagaggtgttagacttacttttattatttatgatgattttgagccacccgaactactatcatgttaattatttttttacaaaaaaaatacttgaaagccagttccttattcctttcttgtacgaaagataatgagattctaaacgtccatatcatattctcatacctcaacatgaatttaaggatactttataagagaagaatattcaacacaattcaacattaacatcataattatatatacacaacattagcaagtacttagctaaaaagaagccagtcggaagtactcttgtttgaaattagaattaagagaatgaacgaacaaaagtcactaactctacaaagtacaatcaccaaatcatatttattcaacttacatcacataagaacaacagcaacagtaccagaactagaagtgagaaattaaagacttcttttttcttcttctttttttacaataaccagatttgaatccatgatttcatatgcatattatccaaatctcactgccactagacctaaaatgaaaagttaaagacttttttgtttttttttttttttacaataatgagatttgaatttaagatctcatacatattattcaaatcccacaacaaggtcaaggaagaacaatcaaaggttttatttaattggtagctgaaatgagtagtgctggtcttgaactactttttgaagaagcctccagccaagtttgcaagaccacctaacccaccaccgccaccaccactttcttcaccttttgactctgcaggctgagaaggagcaccaccaccaccaccctggtaattatgtagataatcagcagccttgtcaacatactgccctatgccttgtttgtcatcaagctttccatacttcgccgccgcgtcgagaagatcacccgcggcgtccgccacctttgccttttccaccttgtcgctctcgttctttagggcggactgcgccgcctccgccaccagcttcgcgctcgcgatgagctcggtggtcgaatgctcgctggggggcttaatgttatgggattcttcggaagccattgatacaatgttacttgcttattgctgcttttgccagaactgttgtgtgttatttatagaggtggggaagatttttttttctctttcaaaaataataatgaatcttcatcataatctttagtatatataatataaatatttttctcttaatataatttattttaaaaaataataattaaaatttaaactttaatatatatatataaaataaatattttttaatataatttatttttaaaaaaaaaatcaattagggtttaaacgtgacaagtgaagtgggagagattttgtgaaagaaaaatctaaaatttgtgtggtgcaagatatgtgggtctggcttatgctcttatctgttttgagcattagcacatgtcgtgtggtactgtttgctttgagtgtcggcaaaacggtgttgctttctgaggttattattgagcaatgacttccacgcgtttgttattgggtcaatgatagactcgtatcttcatggcacggtcgtgtctaaaaaatttgtgaccttagacaattttttttatagatatataatataaattattgtttttttatattaatattctaattttacaaactctgtaggaatatcagtatattcaatattatttagatgtaattgatttatcattttttttcattgattgaactaatttttgtatctttttaaaaaatattaacaaatttattaagattgaatcaattttttaaacttttttctttattttttataatcaaattcataatttttattttacattttctatcactacaaaatataatatttaaaataacttttcaaagtaaacaaaaaaaataagaaaataaaaaaaagaagcttttgattttataggcacattaaaatagcttttgattgcataatgattttacaaaactggaaacaaataaaattaattttattcaatcgattgcaattttataggtacattaaaatagctttagattttttcaattaattttggcattgcaataatcacagtactattttagaagaataagtagtagtcaatcatgatagttaatttaattgaatttacaattaaactaaattcttaaaaaatgaaactaaaactaaatttacggccaataataattaatgtaagaaacaataattattatgaattatataaaatatataataataattgaaaaaatatgagacttaataatcactgtctaacttatctaacagctaatacaatccagaaaatcgtattaatacaaaatatttactttatcataaacaagtttattcattcatgaacctatataaagctaatattttctttttaatttgatctaatccatattcaacatcatgaattaaatcttgaataatataattaggatacatatgtcactttagtgcttgtacttgtgctgaccgttgttgtaagtagtgtgattgtttgatatataacggttgaagatttgcagttgggtggggaaacccattttcctcttaaattattaaattctgcattatgcccactgtagtccaagtaagacggtattatttcagccaagtagaaaattaatgaacaatggtgcatcttgcttggatttatgtctaagaattatagcaacatttaaagtgaaatgattgatacggctacactccttttttggtaggtagagataataaagaaannnnnnnnnnttatttatttattcaagatgtgaaatttatctcattagattcgtgtacatgaaagctataaaaatcaattaatatttaaaaaaagaaacaaaaataggataaaaatatatatgaataatgagtctcacaaaagtataaaactaaaaactctaatgtcattttttttattctccattagactcacttttgccattattttcattatatttatagacatttttttattttaaacattagctggtttcaatagttaaataattaaaaaatgctaatatataaaattctaagattccaacactatctcaaaaaaaggttaatttatagaaaaatggttagcattgttttaaatttatagttgatagaaaaatggttaatttatattgcaagactcaattatttaattcatcaaaatttaaaaaaataattaatttaatttataataataaatttgttttaaatttataattttttcaaaactataattgtcattaatatttctctttgtgtttaacaatatgttaacacatttgcttttttcttttaatgaagtttatttttagtctaaaaataattaatataaaaaatattatagattaaattttataaaataaatgaacatcattttaaacttaattcttatgaaaagaaatagaggaaatatgaatcttataaatctcaattatcaatttggctttagaaaattgagtgatcatgggtgccatgagatcaagtgaaccttcctccgttctcgagcattttttgttgaaatgctttgacaattcagtcatcatatccaaaagtggttgctgaaagtctcgagcagtcgattttgaatgtatgaacttaaacaaatggaccatgagtgcgagcaatgaagtgaacaatgggatgatgaaaatccccccaaagctctttaatgttaagttagggctttctaatgtcattgtggtacttggatttttacttatgatgtcctttgagaagtacttcttcttgatcccatcaaaggttggtttattttagtgaagtttaagattgaccttaaaaaataaggaaccaatggagagtttcgtgggaatgcctgaagaaaaagacagaaaaagttgttaccaatttctaattacatacaaaagaaatattatcaatacaaatttttaattcgagaatttatcatgtttttttatataaaaagggttcaaagggtcgtaaatgtatcatgtttctctatatatgattctgatcaataactatataatatatagttagaattttcaatttatgatcttcaacccaattataatcacataataatgattttgaaccatacaataacctaagaatatatatcattcaatcaaataagtttttatgttttttttatagaaattgctttcataaaaacctacaactaaaatattaaaaaaaatattcaagttaattgtgagtgaagagataaaatgaaacccactaaaaatcagttaaaaacttttttcaaaagcaaagctttttttttttcgaaccatgatattgatattaaataatctctactaaatacaataattaatctttgttgacataatttgattaaagaacacaagttgttactacttatattcatagttggtggtgacaaaacatattaaatatagacaattgaatatagacaattgaagtaaaattaagttaaaaactcaagttgaattctacaattgaagtaaaattagtacttctaaatcttttgctgcaaaggaaatatccactgaaagaaagttaagagtgtaaattgatttgagaaacaaatgtaaagcacacatgataaagtcaagattcaaggaaattagatgctataaaagacaatccttaattatgattataaattaataaaaacctctgaaaataaggacagatgcagagacttacgaaggaaaatctgtcggttttgtaggttggtccaacaatctgatactttttgcagccatcaacaactcctccattgttgcttccagggcggacctacttataagataaattttgacattaaattacaaatatattccgatttttaaaatatttacaaaatagccaagagagtgggcactgagcaatggtccttctgctcagaacgcgtggtccttctgctcagtccttttgctcagaacgcgcttccgtttccgcgcttcggttccgactccgctctccgaggctccgactccgactctgtttctgcgtttctaggtttttttcgaagcagtggcggttgcggttttgcttcgtttcggacgcgattccttcttctcagcgttggctttcattgctttggcaatgctctcgttctccttcttggcagcttcgggcttcggctaacttgtacgaaaaatgttggtgtttctcttgacaaatccatgaacccatttgtttgcttctggaaaataaattctagaaagcattatagaacttttgttaagtagttcattgaagtattgaagtttaaatacattttagaatttagtttctggaaaggggtcattttgaaagagaaaaaagtacacgaaggaggtgcatttagccattgcctaaaagtttggttaaaattaaaaatgccttacaatttcattgtgaaaaattagcttttaggcacatggttcaaaacaaccaagataactctttggtccctgaatacgcctaatatggccaaactgaaagtaaagaggataaaaaaacagcaaaacaagcttctggactcttcaaaagcagcaaaacaattattaagttgaaagtcccaattaattccttgtagctctgaaatagaaaaaccacatagcccatgtagtaagtgcaaattgaagtcataatttgaaatagtactactgtagatgaagagttagtttaacaattgatttcaatgaccaacaatttgaatgcaaatcctttagtatgaaattactcacatgtagcaagtaatttatgcatattttagatgtgttgatgttattttcaacaattcctattgtctaattcagcttaggtggcatgtctcttgtagaaataagcaaggtttacctaacacaatagacaccaccaagccttattttcaacaattcctattgtctaattcaatctggccatacacataatttacaggtttgctatttcagcaacccttttgcttgattttgtttgtcttttttctcttaagtttaagcatctttatgatttaattatttgtgatatataattgattgggttagttagctagtttatgttgatttggttagttaactagtttatatattgattcatttttgtcattttccattttttaggatagaaagatatttaggttctttttttacaaagtcaagtggtacttaacattctcgatgtgaatcttcttcatctattgatttagttcaagataaacaaaatgagtgttcaaaaaaggaaaatgatttgtattttcctgatcctggtaaaagacttcttattatgagcattgtgaagagtgatcaagaaagggaaataattcgaagaatttatctaacgtatggtcattgtcaaccaaaacttgacaactttcctcaatccttaattgggggtaaaatgcataaatttaatcatcaatggtataatgagtttgacacttggttggagtatagtgaatcaaaggatgttgtattttgcttgcattgttatctatttagttgtaagcatgatgatggaaggggtggtcatgattcatttgtggtagaaggatttagcaaatgaaaggacaaacaacgactgattaaacatattgggaaagttggaagcactcataagttgtgtttcagtacttccaaagatttgatgaatcaaaatcaaaatcaagattatcttattcgtctaaatggttctatttgatgtgttcgatatctcatatgacaaggtttaactttccagggacatgatgagacaaatgcttcaataaatcgggaaaaatttgtggagcttgtaaaattcctttgtgaaagaaatgaggaggtaaataatgtatctttgaataatgcccctgagaatctcaaaatgataactccttcaattcagaaagatattactaatgttgctgctagtttagttaccaaaactattatttcagatattgaggataatttcttccctatactagttgatgaagctcgtgatatatcaattaaagaacagatgaccattgttttaagatatgtgaactgcaacggtgacattattgaacattttcttggtcttgttcatgtttcagatactacaactagttcacttaaagaaacaattgagttaatttttgccaaaaatggtttgaacttgacaaagatttgtggtcaaggttatgatggcgcaagcaatatgagtggtcaattcagtggtctgaaaagcttgattttagttgaaaataattctgcttactatgttcactgctttgcacatcaacttcagttagctctagtagcttgtgcaaaaaaggtttgcgcattgactgacttctttaattttataccattggtgtgtaatatagttggtgcttcttgcaaaagagcagatattttgagagaaaaacaatttgatgagctagtaaaaaacattgcaagcgatgatgttcaatcatggagaagcttgaattaagaaatgagtttgtcacgaccaggggacacacgttggagctcacattaccgatcattggtaagcctgtatacattgtttgatcttgtgcttgatgagctagaaattataaaagacgatacaaccttatgcatgcaaaaaggtctaaagcctctggccttatgatgcgtatgcaaacttttgaatttatattacttttgaacctgatgatcaaggtcttagcaataacgaatgagttgtcacaagcacttcagagaaaaaatcaagatattgtgaatgctataactcttgtaaaagtttcaaaggtgttattacagaagacgagagataatgggtgggataatctatttcagaagacttctgcattttgtattaaacatgatatagatatccctgaaatggaaagtatacttgcattacaagatagaacaaaacatagaggaccagttactcatttgtatcactttaaggttgacatattttatgcagtgatagatactcaacttgaagagttgaatgatcgttttagtgaagttagttcgaatttgttgaaatgcatgacatctttaaatctgtgcaactctttatcagcatttgacaagaataagttgtgtgaatttgctagcttttatccttcagattttgatttgaatgattttgtcatgcttgaatatcagctcgacacgtatattgttgatgtgcaaagtgatcctgattttttgaatttacaaggaatagctgatcttaccaagaggatgattgaaaagaaaaaacatattgtgtatcctttggtttatttacttgtaaagttagcgttaactttgcatgtagcaattgcatatgtgaaaataacattttcagccatgaaatacattaagactgcactttgtaattggatggggaatgattggttggatgattatttagtgccttatattgaaaaagatgtatttgaaagtattgataataagacaattatgatggaatttcaaaaaataagacctagaaggatgacattataattatttttattgtaatatacttttgttattaaaatatatgtatttgaacttattgagtgttcttctccattgatttcctggatccgccactcattaattccaagagacagagcagttcataggcctcagggccttgataaccctttaacttagacttattgaatccaagctttttctattagtaaccctttcgcaaagggatcctgaggatatccgacaaagtaattgtttgtttttatctcttctccatccacaaacacaggctgcagtttccgtaccgtgagaattgaagctaaacttgcagtgtaactttgtcttatgatgagtaccacaaagaaccgtataatcagcacaaatcgtgaccaattgttctctaccctctcccctgccaacaaaggttttaagttaaaaaagtcgaacttaaaaacagaggtttttttttttcatgaagaaattaagaaggcattagtaattttgttttcttgaatatttgcaagtaagaaggaatcaaactatcatgattgaccgagagtcatgataatttggttcagtggtgttcaaaagaccaaacgatgaaaccaatgaagatataggctgcaccaatcgtcaaccaaaggtcccaactaaatgactttaggaaaatcaaatgttttgtttctcatcatgctttgccaaaaccaacattgtcacgcctgattctgaaaatggcattgtaaaatcaacatattttgagcgcttagccacaattgtcacgtccccgaccacagcgtacttctgcatacaaaagaatgaagcgctaaggaataaaataaaactttcctcatcttatggaacaagacaataggttggtcttgagattttttatgtcctgaaccaaccaaaaaaattgaattctcataatcatttaatttttgtctttcttataactttttgtttcaaaatcactaataattcgtttataattaagatttatagaaaaatgttttcaattgaaatcaaaacaaatttatttaatattaatacgaactaaataaagaaagatgtaatttctattctggtcttttaatttattttttaggttcattttgttactcttattgttaaaaggtttaattaagttttctaatttaaaaaaatgatttaatttaatccttttacttttaaaaattcgattaaatcatttattttttaaaattaattcaatttttttgatattttttagttgctccaaaaaatttgaaaaataaaacttaagaaacaataaataaaggaagcttttgaaaaagagaaaacttacattttccttaatttgcataagaagttcgtcgtaggtaccagcaccctttccatgtttctcaaaacggaagagttcataagagtcgatgtctctacgtgtttggatggggatatttaataaaataattcatttcttatgaaatttaaattgttttatatagaatatttaaaaaagaaattaaattctgatatttttgcagaatattttaatcagttaaaatgttcgtattttaaaatctctcaaaatctaaggaatttgaattttttttattcggaaacacttgatgaagctcttgctcactgtcgatgtcgctctcctgtctcgacactcacatgttgcaacgatggttacgcaaggctcgcattctctctcgcgatcgctctctctctccctctcttatacgaccgttttctcgctctctctctttttctctcctgcatgatcacttctctctctctcacggtggtttgtccagttatgctctctcgctctctcatctatgtaatcaaggtttttcttcttgattttgtttgcttgtgtttcaactttattgtttgattttattaattaatttgcattttcacgaaacatcgttggatttgcatgtgtttgtttgattttattgttgattatgaatgcaatcagtatttagtttgtaatcttctcgtttgcatgattgtttggaaccagccagtggtgagtctgattgcttatttgttctgctttttttttttttctcacactttgtatctgaaccaatcaatggtgtagaaagcattctgttttcactttatagcatatatcagatagctatttaacacctgttttgaacaacaaagcttgtttgtttgcatattaatcatagggtttctaggttccattttctactctgtttgatttcgttgtcttggtacatacaattcattcttgtgtttaagactgtgaggttgaaggtgcattttaaagaaatatttgggaactgatttcgttgattgatcgaggttgcatgaacaattcgttgataatatatacaatagagattgtgcagcttggtgcctacaattgtggagaaaattcaagcagtttcatgaacttggaatcacatttatagggtgtcttcaacccttgttgctttttttgttttgagaaatgtatcaatgcacccaggcaacatttaatccttcattgagaacctaaaccagccaatgattatgtgaagtgtagattcttcatggttatgcagaattcttacaagttgctccattaataagcccattggaagccatcattgatcaatttaggtgctttgggcgtatgaattgttactaacctgttagctgatgcttaggggtagagacaaatagaacatagtcatgctagagatgactcaaatgttctacttttcaacatttttctttgtctgtttaattagaagtacttagacatatcaccataataatgtgtaattggaattcgattttgattttaattattattacaaataaaaatgtttaccttttagcattttgcgagttaggtatgtgagatttttggaattctggttaggttagaagtggatccaattgaatctcaaggaggtatttttttttggctgactgatagaaaaatatataattgagtacagttacttacacatgtacttgataaaaggcttacaagaaaatttaaccattgagatcttttgttttggctcactagtttattcactttattgatttagagcttgttcaatcatactttggccgaaaaaaagaatttaccttttgattttggagtcatatgactcattatattgatcatattaataataatacaccattcacctctgcatggattgaatctcttagatactgaccacttcagtttcgtcctaagttttgtttgtttggtattctttgcctcctacttttgttagtttgcaacatttttagaaatctgtttgtaccatcagttgcaagtcttccttaatcccaatgatttactcttaagtgccaaacaagccatcctttatacattttctattactacttccagttccagagactttggcataaatctgatctctttttatttgaacaaaatcagaatacatctctgattcactggtttagtatttttattttttattcgtaaattaatgagtagtccaagccttcatttactcttgtgctgatataaatattcattatacataatattgatcaatggttgtactactgcctaggatcatacataggatgaagacatccagtccaatttgaaactaccagaccaaagattattcggacctactctgcataagtcactgggccaatgggaataaaatgtgttcccctcttatcattatctaggttgtttagttatggagagaatatgagagttgtacaactaatgacttatgcattcaaagtttcaatttatagttgtcgttgtaaaaatatagaatagttagaaatcatatgctttgctaaaattataagttggtatctcacttatttgtatgtacttcttttaccttttttttcacgattttatttactgaaactccgcctatgtgtgtatgcatacatggcctatcccaaggcaggataaagaaggagggttgtcatcaggagttgcgaaccggccataaaaaattagctattcttatgtgatgaacatttatgatatttcgttggggcgttccctttataacgatgcgttacatcggaccccaggtgtatcgaaaaatgagctaggatcctcgccacaaggcaagacactacatcgatcccgggatgtagtgaaaaggatgctagggtccatgccaaaaggcaaggcgccaggtcttcacccggatttggtgacaaaaaggcaagggtcccaacacgcaaatgggcgagcgtggcaggcaaacacagcccaggggtttaggatgaaattgggaagctggaacataggaacattaacgggtaaactgagggagttagcagatgtttttgtcagaaggaaagtgaatgttgtttgcttgcaagaaactaagtgggttggagaaaaggccaagaaagtggagggcacaggtttcaagttgtggtatacaggtactatcaagagtcgcaatggagttggaattatgatcgatagaagtttcagagataaagtcgttgatgtaaaaaggaaaggcgacaagattatgatgattaagcttgtagtgaggatcttattttaaatatccttagtgtgtatgcaccccaagtgggattattatcagaagaaaagatccaattttgggaagacttggaagaggttctgagagggataccacgagaagagaagattttcctaggaggcgatcttaatgggcatgttggtaaaaacaatggatgttttgatagaattcatggtggttttgggtatgggacgagaaacaagactagagaagatgtcttgaacattgcactagcctatgatttgatgctagcgaacacttttttccaggaaagggagtctcatcttatcacgtatcatagtggccaaaatcgtagtcaaattgatttctttatggctagacgggaagatagaaaaattcatgtattgactgtaaggtctaccctggagaatatgtggcgacacaacataagttggtagttctagatgttaggttcaacaaagttcttaatttgagaaagaaggatcaaaacccaaagataagatggtggaagctaaaggaggagaaacaaatagagtttaaggaaaatatgttgcgtgaaggaccgtgagagtttattggagaagctaatgaaatttggaataagatgacggtatgtgttcataatgtgggaaggagggtgttaggtgaaagcaaaggaaacaaagttcttataaaagaaacatggtggtggaatgaagaggtgcaagaggctattaaacagaagaatgaatgctttagatctttgcataaatgtcccaatgatgagaatttgtaaaagtttagagtagtgagaaaagatgcaaagaaagcagtgcgagaagctagaggaaaagtttttaatgatttgtataaaaatcttgggagcaaggatggggataaagatatttataaacttgcaaaaatgagggataagaagagtaaagacctcacccaagttagatgtaccaaggataaaaataaaaaaattttggtaagggatgaagatgtaagtgaaagatggttacactactttaacaatctttttaatgggaattgtgacaggagtgaggtggaattggaggacatttctgatgatctgaatagaagatttgtgcgcagaattaatacacatgaggttaaagaggctttaaagaggatgaagaataataaagcgttgggacctgatgacgtccctattgaagtgtggaggggcttgggagatgtggcaataaaatggttgatcaatctttttaataggattcttcaaacaaacaagatgtctgatgcttggaggaaaagtatgtttgtgcctatttacaaaaacaagggagatatccaaaattgttcaaactatagaggcatcaagcttatgagtcatactatgaagttgtgggagagagttatcgaacatcgcctaaggagggagaccaaggtttcagtaaatcaatttggattcatgccaggaagatataccatggaagctattttcttgttgagacaattaagggaaaggaagaaagcttacatatggtgttcatagatcttgagaaagcatatgatagagtcccacgagaagtcttatggtggactcttgagaagaaaaatgtagcattaaagtatgttaatgcaaaagatatatatggtggggctaccacatgtgtgaaagcttgtaatggaacatcaaggtattttcctatcacggtaggtatccaccaaggttcagctcttagtccttatctttttgccttagtgatggatgaactaacgaaagatattcaagaaggagtgtcgtggtgtatgctctttgcagatgatatcgtacttattgatgagaccaaatatgacgttaataggaaattggaattgtggagaagcactttggagtctaaaggattcaagagcaagacggagtatatgaagtgtgaatttttgaggattaaagacgatgattaagacacagtgcatctacttgggcaagaggtacccaagaaagacgtttttagatacttgggatcaatgttgcaaaaagatggtgagatcgatgaggaagtaagtcatagaattagagtagggtggatgaaatggcggagtgcatcggggtttttgtgtgactgcaagattccccttaagctaaaaggaaaattctatagaatagctgttaaacaggcaatgctatatggagcggaatgctggccagcacataggcaacatgagcataaaatagaggtagcagaaatgaggatgttaaggtggatgtgcggatatacaaagatggataagataagaaattaggatattcgacaaaaggtatcagtggtaccggtatgtgaaaagatgagggagcatagattgagatggtttgggcacgttatgagacagtcactagatgctcctgtcagaacatgagtttgttaccaagagctagatacaaagagtggtagaggttgaccaaaacttacctggggaaaggtagttaaacaagacctaatggagtgagatatagattgatggacagtatgtcttaggacggagtggagaaaagctataagcttggtggaaggttaaaccctttaatagttctatgttccagttgttcccttatttaattattttcctcttcttttctcctttcaccattcttttattttagctttgtttctctcttttgtccgattttcaatttatcattaggttcatctaccaccgaccccaattaacttgggttaaaggtgctgttgatgatgatgatgatgaatattttacatagagaggaaattgaattactttatccaaacaagtaaattgaaatacaaagaatttgaaatgctttatcaaaacaaaaattatttgtaaaatgaagggaatttaattacaagtaattcaaatgctatgtattttaatttccttaaattgctagaattctccatccaaacatatggtcaaggtttcaaagaacacatcaaaggaggagttgaggaatttcttgaattcattgacattgtttgtcgttgggattccaatcctcaactttgttagtagctctgttgttacgaacgcttctacttcgcttgtatttcgtatttatttttatttgctaaaattttttgaaaaacagaaaggataaaagttccaaagaatcttggttcattttaaaaacgaatttagaaattaaagttcaaatgaaaattttattgatttacgaacgagtttagaaattataagagttctacgcgttatttaaattagatagttcataacgttcacacataccatacagtccattcattattacatatccagagtcccatatataaacagtccacaatacagcacaagcatagatcatcaaaatcaggcaaacagcacataatcttcatcctatcttctcgtgcgacatccatatcactgcttttctgctcgtccaaaatgtgggatcatcacaggtgtcaaccaccagacacaacacagggtcagtcttgataaacaaaatttaaatattaacagaccaaaagataatcaaatttaaacatcgacaaatcaaataaatatacgtaaaccactaataagttattctcacacacagaattgtcatgaaatgaaggaaaatgcatgctcatcttattatatgatgcatgactgagatctcagcaacttctaaataattgtggccactgtcagataaccccactctcaccttagtggaacgaacttatccatccggtcagggtagctcagtggcgcgtaggattatcactctcattcatgtgatcatcatggtggggtggtcctcactgcgtctaccccttagttatatggactcagtttagttatctgacactcctctttatgagatttaacatctcatcatcatcatcatctcgaattctaccccaccgggtaggtgcacatggaatgcatgaatgattcatttttcaacttgtaaattattattttatgttcatcacaactccatcacacatcaccgatcatcatcgcagtctcatctcaacatcacagatcatcatcacaatctcatctcaacaacacagatcatcatcacaatctcatctcaacatcacagttcatctctaaattcatttttcaacatccacatcatcaatcatcacacgtcttattgactttattcaagaattgaatctcttaatgacagataagtttaatgcatgttatctttactactcataaatattttccatgacacataaaatcaacactattaactggatactcgaatatcaacagatcacacgatgaacatactttaatcggaatagatctccacaaatgatattcaacaatttaaatacaacaacaacatccatacagaattattattttacagcaactagcaacaacagcatacagaattattaatttacagcaactaacaacaacaacatacagaatgattaatttacagcaactaacaacaacagcatacagaatgattaatttacagattaattaaaaatatacagatctgttcaataaaagcttacagattcatcaattatcacatacagtttgatttaacaacagcatacagattaattaacaacatacagttttatttaacaacaacatacagattaacttcatacagttttatttaacaaaagcgtacagattcattagctttaattttacagcaactatataatttaacaattcaaaacatcatcaaaaataaataaacagcatctacaaactttacaacaaccacaattatatccataattaattttagttcccttataacttttactaaagcatactaacttaaagttttcttaactctaattctactatattaaaggttacactattctaatcaatcactcaagattaaaccatcctaattaatcatttaagacaataaaatgaaaccatcataatcaactatccaaaacaagataattttaaacaataagaagttaagtacttagcttaattatggttacttcattcatcccaaataacttacctaattaaacttgattctcttaatattttcttcctcttatacttttacttaattctatcttaattcaagtaatcaattagttgagattagagattaatttgaggtaagctaatatttaaattttatttaacaagactcccccatacctcaaatattttctaaaacttgaacaagcttgcttctttgctcccttgctcccctttttctttgcgagcttccttggttttttggaatatttttctttggtgaaaatgatagctccaggcaagaggtacacggttaaggctttggaattcattaaaactaaaaacaaaaggcaaatggtagggacagatagtggcttgttttttgtcttaacaaaacttaaagcaaaatcaattgatggatctttagggctgcatggttttccttttgtagttggattcaagaaagcaaaacaaaaggcaactagtggggcttgggaaagtgcacggttggtgccttataattttggattcaacaaagctttgcacaaaatcaagggaagagtgaaagggctgcacggttcctccttttagctgacccaaaaattttgcttcttcctttccttatatagctaaatcaaaatatcaaggcttcctctcttatgcttgcacggatggggagcttagagataagtccatgtgacttttattccttgccatttaatgtttattctttgccatttaatgttgattcctcttgttccctttcaattgcacggttagtcattggcttggaggaagtcaatttggttttttcttccttgcattcaatgtagattccctttgtctttgaaaaatctgtccaatgctttatctcttgttaattccttcttcttgctcttgaattggcctacctccccttgattccttggccattccacgtgggattcacccatccaaagctattcagattttttttcttctttgaccgtagccaccttggtccaatactacatgtgtttttttttctttcttcttcaccgtggctatatcttttggtgccttgtcctttcccaattgttttgcttaatttctagttagcttgtgtgtgcttatagacttaataataattccatccttcccctccattatgggtcacacggttagccttgtttcaacaactagttctacacttgttttcttttaaatagcaaaaatcctcttttcttgttgattcaatttataaaattactaaactatcttaataaaatcatctatttatttcaaaactagtagaatactctaaggattgtaactatccttttcgtatagttttctgatgcctgaagtagtatagattaggctcttttccaataatcttcaaaaattcctaaaatttattgtttaggattttctaaccccaatcatgttaataatgtgttgtctaaaagtattctatcccattctcaggtttccataattttctaaagtcatcttgatcagttttgacccaggggcattttggtaattttgcctctcactctaggggtaaaatcgtcatttccaaaaatattcagggaaactctgtaattgtcaccctaagggtattctgataatttttcaagcatcctagagtatttacaaaattttctccttcctctatcttactaaaatgcctggggacaatttggtcatttcccttaaatccttctgtactgtctctagttaacattttaccccaatatttgactgtgattccaaaattttggggtgttacatctgttgtgttacctgaacattttggttactctaatttagaaaatcctatctttggcctccaaattccaatactcctccctatttgtttcacaacattgaacactttaagaattgattgctctagttgtcctttaaccaaatggaaattaccatagaggctatggaattgggtagccatgattgtattgtgaagggtggtagtagtgacatttttttgtctaggagagagtatttcgctaatgtccaataagaatcgtaagcccacaatccaaagatggttacattggttctatatcttggattctgctacatacactatatatatatatataatacattatatgtgaatagtgtgcgaacgaaaataccttttgcaatttgaaggttatggatttcgtaaccttcatacggattgacgaatccgtaagaaacttacgaattcgtcaattgtatgagttttttgtttacagattgggcaatccgtaagttttttttttctcttacggattgggtccaatccataagtgttttttttacagattgcccaatttgtatgtgtctttttttacggattgggcaatacataagttttttttcccttacggattggggatgtttttttttacggattgcccaatccgtatgtgtttttttttatttaagtgcattttttttacagattgggtaattcataagtgtttttttttttgtaaattaaaatatattttacaaaataatttaaaataatgacgtatgcaggtttcaaacatgcaaccttcacattattaacatgatgctcaaaccaactaagctaatagatcaattatgttaaaaaataattaatgttgatacatataacatcaactttttaatgtatatttaatacacatataattttacataataaatcttgtaataattaatttttttacatataattttggtataattttaaataaaaaaattaattattaaatcaaaattaattgttacaaaatttattatgtaaattatatgtgaattaaatatacataaaaaaagttggtgtcatatgtatcaacattaattgtgtagttggttggagcatcatgttaataaggtgaaggtctcatacatgcttgcaccattattttaaattatttcgtaaaatatattttaacttatgaaaaaaaacacatacggattgggcaatccgtaaaaaagacactattgattggacaatccgtaaaaaaaaaaacttaaatctgtaagttcaataaccttcaaatcacaaagggtatttttgtctgcacactattcacaattagtgtattagaaatatatatatatatatatatatatatatatagcgtatgtagcaaaacccccatatatttctttgtagttgtcgagccttttagtgtgttttggactcggcctaactcctagcacaccttgcatggtccccatgcatttgggttttttcttctacccaacaaatatcaaatactccatttttttttctttaattccaagattgtcattttgtacttcttcatccttctttccattttcaactttttcttacttcgttgagctcctccttctattggctcgtgatgattttttacctacattgtggcgggggtttgttacctatattgactttgtcgtagtcgtcataagtgttgcagtaagttttttacatctgtaaaatattgatatgtatgagccatatggattgttaattcgtatggaccatacggatcgtgtaacgtcccctcaatcattagggtcattaccaagcataaaccgcaatcaaacatagaattaatcagagtttaagcagtttggaagcatacactaagagtgacgtcatcaaaggtcactatcataacactgtacattatactatggtgaatatacatatatctttgtttaagtacaaaactgtacaaatatcccctcagggtacaacaaagctaaaccaaaggcagaatacaaaaatatcagagcctcaagctcaaatcatctatgcctaaggttctcaaaacataactatccctgcacaggcttcttgccttgggatctatcagctcctcctgaggattcacctgcaaaacataagccccacacaaggggtgagatataaaatcctagtaaactcagggcccttgaaggtatttccttcccctggttcacttccatacacatatacatgaaaatagtatatcaacacaaatccatatcaacatcagagtatcatcaatatgtattcatctgacaacaatcagtgaatcactcatcaatactcatgcacaaacaatgcatctctacctgaccacaatcaggctaaactcatggcatacaaccattcatcatattcataactatcatgcagaggctacatctaggtatataggaacatctccactcagggaggctacctctatatactaggtacatctcctacctgtatatacctatcggaggcttcctctatatacatatatataggaacatctcaatcacgaggcttcatctatatatatcaggtacatctccatctgatgaggctacctctgtgtatataggtacatctctactcacgaggcttcatctatatatatcaggtacatctccatctgatgaggctacctctgtgtatataggtacatctctactcacgagacttcatctatatatatcacaggaacatctcatcctctatcacaatacaattgcctgaggaggctacctctgtggatatgggaacatctccctgcaggaggctacctccatatcacaggcacatctctcaccaggtctttctcaatctcaagtcatctatcctactacaataggatacaacaatcaaccatgcaggtaatcagctaggcaaatcatggtcatacatatcaatcacccaatctcagggcgtagctcacaaaacaaacatcatatatcaatgtacatccattcccctttcacagggtacaacacaacattcagcatccagtcacaatacacaatttttacatatacatgtataacattacacaaaaccatcaccatattaagataatggtgaaactcagcaaaggatgcacagacaagaaccaagagcttacctgctctagacagatcaccggctctcccggcctcgtggtcaaagccaccagagctatctagctcacgtcctacataagaacaatcacataactcatcaagtacggtcctaagccgttagaacgaaaggaaactataatcctttctacataacatataataaatcacttcacaagtgattcccagaccctcacaaggatcctactcagcccacacacggctccagagccttaactaagactctaatcaggctaatatcaagcatatccctgctttagccttctcaatatccaacttacaaacaacatctatactgtttcatgaacaaatttgtcaactgtcctaaggttcatactagtcatatcactagccttttacctctgctcatatatactcagagtcaaaatcaaacttcatcaataatgatgattcaaggctctaacttccttagaacaaccctctgagcataaaactctacagagtccaagcttaataacggctctatcacctccaaaaacacctctcaaggtatccaaaaccaaccaaaatctaaacacagaatcaacggctaaagctcgaatttcttacctctgtgtagcccagacacaccagggaatcactttccctaaggcagatcgctcaatcaaagcttccttcgcctctgattcttcgattccaagggctctcttagaaatctcgatctcgccgtttactgcctcttgccgagaataaagctgggtgtctagcttatctcgaggctctgaacactttctcagttggttcggaggtgtttagatgagcaatgaagaagatacaaagctctctctctcaacaatggcttccctctctctcttcctctcttttcccttcaattttcgtccaaatgaagctatttataaaagcctgcccgaggtcccgcgctgatcgcgccatacctcgaatgaccagcgccattagcgccgtaccccacacggatcgcgtgaactggccgcaaggattggcttggtccaggcttctcgcgctgaccgcgccaactcccgcgctggccgcgccacagactcgaacaacccacgctgttagcgccgtatcccacgctaataacgtgaaatggccgaaaccattggcctgtttcatgcatcccgcgcggttagcgctagactccacgcggttagcgccactcgttcgaatctgttttctccttcttttcttaagcttttctcttagggattctaaagcacgcttattactcttaatcatggtttaatctaggcttaatcacatgcttaaaaattcaaggtattacagatcgtcaatctgtataaccatttacttttttaaaaaaattttaagctatttttttaaaaaaaatagttaaataaaaaaataggtcatattatagaaaaagtgttacctattaataaatttgtataaatattattacattaataacattaaatatttatataaatagtcctttcaagtctagaaaatttcaaaataaatttttacattgatttttaaatatataatagtattaaagcatttatttattatatatttaaaataataatcaaatatggaaattaagatataaatcattagatatatatatatatatgcttatccatttcaatgtaatacattactatattagtatacatttaaatagttatttttagattttttgtagtaaaataaaaaaccgaattgtatgcatacacaaaaagatttcatgtatcagaaaaataataaatttgtaccnnnnnnnnnnnnnnnnnnnnnnnnnnnnnnnnnnnnnnnnnnnnnnnnnnnnnnnnnnnnnnnnnnnnnnnnnnnnnnnnnnnnnnnnnnnnnatatatatatatatatatatatatatatatacacacacacacatcaacattacaggtatatttaattgttacattaatactttttctcaagtgtaaaatattttaaaataaatttctacattgaagttttttaaaatatatagattatttttaaaataataagaattaattaaaagtaataagaatgaataaattttattaatagataaattattattattatatgtatatacatgtatcaattattttatgtcaattcgtataggctatacaaatagaatttcattagttttccttaatttatcattgaaatttgttatttttaatgttttgttgtgatggaagaagatgagtggatatatgagaatattatgacagaagaaattaatatgaatgaagacacgggagaggaatatgttgtggttgaaaatattgattattttgatgtcttcaatacttctcaggtatttatatgattttttatttggttaaagtaagtaaatgaatatcttaacaagactaaacatgtattgtcctttctgtaggtgtttcctacccatgaggacatattgcaatgggatcatactgttgcgtatgatattgattttgtgactgtgataatgaggtctgacacatcaattggaaagagataaaggatctcatttgttttaattagttgtgagaagagtgaaaagtatagatcatacaagaaagaattattacggacgacaactagcactagaaaatttgattatccttttaagttacgagcaaaaccagtcacgggaggtgaagggtggatgatcaacttaatatgtgggactcataatcatgcattagttaagtcattgagtggacatccatatgttggtcgactaactgaggatgagaatattattcttggtgatatgacaaagtcaatggtcaaatcaaagaacaatcttcttacttgcaagaaccacaatgccaacaattgtacaacaatgaagcaagtctataatgcaagatatgcatatcgttcttctataaaagacaataatactaaaatgcaacaattaatgaagctacttgaacgcaatatgtataatcattggcatagactgaaggatgaagatgttgtacgtgatatattttggacacatttggatgcaaaaaaaaaaaggcaatgcatgtcatttggtttacattgttggtgtgacacctactaggatgatattttcagttgcatttgcctatttggagggcgaacttataaacaatgttgtctgggttcttaaacagtttagaggtatttttatgagcagtgatgcactccctcaagtcattgttactaacagagcttcaacattggtgaatgtagtgaaaattgtgttccctgagtcaactaacatgttgtgtcggtttctcattgataagaatgttaaggcgtgggtaaaaataacgcatgggactaggtgatagaagcatggagattttgtggattgtcctgctaagatagagtatgatgactgccttaagaagtttgaaattgggcgttcaccatggctaatgtttgttgactatgttaaacacacatggtttattctccatagacaattatttgtaacaacatggatgaataaagtgatgcatctagaaacactacaactaataggtatgaaaattattaatctatattgttttcattaagaacacattaatggatgaaaataattctttgcctttttatatgcagggctgagtttgcacattgaaccttaaaaaaactacttttcaatagccttggagacatatgtagtgtttgggatgccatgaacaatatgatcactttgcaacacagtgaaataatgacatcttttgaaacaaacacacatgtggtcagacatgtttttaaagttaccttatataagagactaattggcatggcatcaagatatgtgttaaaccagattgttattgagtttaagcgagtgaattatgttggcattgatggttctcgttgtggatgtattattaaaactactcatagtctattatgtgtatatgaactagctagatatgttattggtagcataccacttgacacagtccatatgttttggctgaggctaagtttttttagaccaaggtttatctgaggctgaagtccgcataaccaaagagatggaagccatatccatgtggcaaagtgactctaaagagtaaactttgagaacttgcataccctgatctaactcgatgtttgctcctcttggaaaggtaaaaacaaaatatggttaaaagaaacagatgaccagacaacaaagatcaacaaagcgttaaccgtcttactttgagtatatggatgcattacatttggtataaaatagttgctccacactgaaacggtctgcatcatcatctgaacaaacaaaatcgaagttgaacatgccaattttggatcaatttcatccatgcatgccggatttcattgaaaccattattgatttcaaaattgatggtaattatggatatcgtgtaattgttgccttattaagtttgggtgaagattcacggtatttggttcataacttggacaatggtgtgatgactatatagttatgtttggtggcatagatagatatgagcatttaaagtggtctctacttgttgatggaatatccatgatatataagttttttgttacacattaatggataattattattattataatacttattaaatttgttacatgcagctaaatatggataagtggacaaatattactaatatgggttatgtcattgaatcaaggtataacgtcatccttgcttctctttctctccaacaaagcatgacgtttttccctcttagaagtcaaccactcagagatagttcgcttcattgcattatatgtattggtcatgtctatgacaatcattttgtttaggtataacaataaaccatttcgttaatttttttattataacacgtgttattaacatttgaatgtgtactggtcattgtaataagttttccagagagatggttgtcctatgtcgtcaactgctttgttatggtcaacacactactacagcatcccctttcaaagtcgatcctttcacccaaacaaagtcggttgtacaaccgactttgtttccgacgtagtagaaagctatgcacaaacaaggtcggttgtaaagagtccgtctttgaaagtgttttttttttttttgcataatgtagtttcaaagtcgattataaaattaaccgacttagaaagtactaattcaaagtcggttcttctaagcaactgactttgaaagatatggatcatcagtctttttaagtcggttcccagtaaaaaccgacttagaaagcttccactattaagtcggtcccatcaacaaccgacttagaaaggcttcgaagcttgacttttttaagtcggtctgctcaacaactgacttagaaaaaagaagatattaagtcggtctggataaacaaccgacttagaaagggtcgtatttttcacattttaaagtcggtccccaacaaacaactgactttgaaatataacttattaagtcggtccagacagaaaccgacttagaaagcagttacacgggcagtttcaaagtcagttatttttaaataactgactttgtttttggggatcccaaagcttaatctaatacggttattatgaataactgactttgaaactgattattggactacaattttttnnnnnnnnnnnnnnnnnnnnnnnnnnnnnnnnnnnnnnnnnnnnnnnnnnnnnnnnnnnnnnnnnnnnnnnnnnnnnnnnnnnnnnnnnnnnnnnnnnnnnnnnnnnnnnnnnnnnnnnnnnnnnnnnnnnnnnnnnnnnnnnnnnnnnnnnnnnnnnnnnnnnnnnnnnnnnnnnnnnnnnnnnnnnnnnnnnnnnnnnnnnnnnnnnnnnnnnnnnnnnnnnnnnnnnnnnnnnnnnnnnnnnnnnnnnnnnnnnnnnnnnnnnnnnnnnnnnnnnnnnnnnnnnnnnnnnnnnnnnnnnnnnnnnnnnnnnnnnnnnnnnnnnnnnnnnnnnnnnnnnnnnnnnnnnnnnnnnnnnnnnnnnnnnnnnnnnnnnnnnnnnnnnnnnnnnnnnnnnnnnnnnnnnnnnnnnnnnnnnnnnnnnnnnnnnnnnnnnnnnnnnnnnnnnnnnnnnnnnnnnnnnnnnnnnnnnnnnnnnnnnnnnnnnnnnnnnnnnnnnnnnnnnnnnnnnnnnnnnnnnnnnnnnnnnnnnnnnnnnnnnnnnnnnnnnnnnnnnnnnnnnnnnnnnnnnnnnnnnnnnnnnnnnnnnnnnnnnnnnnnnnnnnnnnnnnnnnnnnnnnnnnnnnnnnnnnnnnnnnnnnnnnnnnnnnnnnnnnnnnnnnnnnnnnnnnnnnnnnnnnnnnnnnnnnnnnnnnnnnnnnnnnnnnnnnnnnnnnnnnnnnnnnnnnnnnnnnnnnnnnnnnnnnnnnnnnnnnnnnnnnnnnnnnnnnnnnnnnnnnnnnnnnnnnnnnnnnnnnnnnnnnnnnnnnnnnnnnnnnnnnnnnnnnnnnnnnnnnnnnnnnnnnnnnnnnnnnnnnnnnnnnnnnnnnnnnnnnnnnnnnnnnnnnnnnnnnnnnnnnnnnnnnnnnnnnnnnnnnnnnnnnnnnnnnnnnnnnnnnnnnnnnnnnnnnnnnnnnnnnnnnnnnnnnnnnnnnnnnnnnnnnnnnnnnnnnnnnnnnnnnnnnnnnnnnnnnnnnnnnnnnnnnnnnnnnnnnnnnnnnnnnnnnnnnnnnnnnnnnnnnnnnnnnnnnnnnnnnnnnnnnnnnnnnnnnnnnnnnnnnnnnnnnnnnnnnnnnnnnnnnnnnnnnnnnnnnnnnnnnnnnnnnnnnnnnnnnnnnnnnnnnnnnnnnnnnnnnnnnnnnnnnnnnnnnnnnnnnnnnnnnnnnnnnnnnnnnnnnnnnnnnnnnnnnnnnnnnnnnnnnnnnnnnnnnnnnnnnnnnnnnnnnnnnnnnnnnnnnnnnnnnnnnnnnnnnnnnnnnnnnnnnnnnnnnnnnnnnnnnnnnnnnnnnnnnnnnnnnnnnnnnnnnnnnnnnnnnnnnnnnnnnnnnnnnnnnnnnnnnnnnnnnnnnnnnnnnnnnnnnnnnnnnnnnnnnnnnnnnnnnnnnnnnnnnnnnnnnnnttcctagcaggaacatccaatggtgtatccacttcatctggaaactctgcaacaagaaaacaagcaaatgacaagcaacaaattggaaatagtatcattgtatcagcaatacaactgcaaatacaacaggcaggaacaagagaaattccacaaaaaatagtttagataaacattcgatacaggcagaccaaatattcatgccttttttaaaagggacaaatgtgaccaataaatactaataagaatagaaaaggatagaaatgcaccctcatctgctgcatgtgcttctttaagttccttgagttcatcttctattttttctctggtcaaattatctacttcctgtaatacaacagaagtaatcatgcattgatgatatacattagaatccatcgacacaatctgactcctcctcatcagaatcgtccacaatccaagcagcctgaaaatcaaagtaagagctagaaatatgttatttctatactggaactggatatttggtaagcccaaaaaatattaaaaagtaaaagataaacaaaaagcattcagaaagaaataaaaaattcagacctgatattctgaagtgccatgaggaagactcctcttttttatcttctttttcttttgatattcatcagcctcagcaatttcagcctctgttggccatgtctggtaacaacaaatgatgccgtacccaatcattaagtgaagaaatattcagaacatgcaaaatggaccactccagcggaggatagtgatgtctttttgaatgttctttccagtcttaagtttttcaaggctatgaaaatattttctaacacatttgatatttttatcatttcatttcaataccccaagaagccaacattagtaaaatatacaaaaataacaagatgggaataaaccagaacaaacttcacctcaacaagggtatgttcaaaagcaatagccagcagcttatcctgataaataaaaaaagcatttagataacacaaattacttacagcatgatcaaattacacaaagcattaacaatgaacacatattttgccaaaaatcaaggtatacttactagccaccctgcaatgcctggaagttcagtcacatcaagcccatgagtaaatataggtttgacaaagaacaaaagaaaagaatcttggaccatcatccaagagacataaccttattgataattaatattgtactaatccattcaaaacgcttttgtacaatacctgaccaactccgattgaattctgagtagcacctactaaaaaggacattatagaaataatcattatgaaattattagattttaaccattaagtaaaaaattaaataattcccaacataaaaaaaaaatgtttcgtataaacctgctcctatttaaaaagtagagacgtatctcatacagcagtccaaggtttgtacttctctaagtatcaactcctgtttcacaagaatttcacaccaagcaaaattttagtgatataatagaaaactgaaaatttgtaaaataagagttattaacttttaatccttaatgacaacaataatcaaggaaactatttgtatttggtcaaagtgagaacagtgagttaccacaattgattctcaatcttctttcttgtacatacaatcccacaagtgtagttgcagtatatggttttgtcactataaaatgtgaataaaaaaactgctatcctcaattggtttttcaaagaaatttgttgcaggtttgactatactcagtttttattttttctgtggtatagataatatatgtgtacaatactgcataattagaggctcgtaattaaatttgtatgctcacacgataagttacaacaaaagaaatcagacaattgacatggaaatggggcagtcaccattatcacgggaagtgtaaattaggtggacagttgttaaatatattatataatccatacaggcacatacacaattatgatgtacagtgtacatgccaatattagcaattagcaatgcaaaacataatcaaacctgcttacagaagtagacaactctgcttgggatccacctagtgcatgacgcctctgtgaatttgttggatatgaagatgatccagccagcttctaaataaaaaagaaaaagacattaaaaacagtaactaaggacaaacacgcaatcagctggccaaacagtaagagtgcaagatcatagtactaagtgataacgttactaattttattggatccctattagccaaaatcacatacannnnnnnnnntttttattttttctgtggtatagataatatatgtgtacaatactgcataattagaggctcgtaattaaatttgtatgctcacacgataagttacaacaaaagaaatcagacaattgacatggaaatggggcagtcaccattatcacgggaagtgtaaattaggtggacagttgttaaatatattatataatccatacaggcacatacacaattatgatgtacagtgtacatgccaatattagcaattagcaatgcaaaacataatcaaacctgcttacagaagtagacaactctgcttgggatccacctagtgcatgacgcctctgtgaatttgttggatatgaagatgatccagccagcttctaaataaaaaagaaaaagacattaaaaacagtaactaaggacaaacacgcaatcagttggccaaacagtaagagtgcaagatcatagtactaagtgataacgttactaattttattggatccctattagccaaaatcacatacaacagaaagcctgctctgccaccaaatagggcactgattgctacaggtggacctcagcaataagccaattaccaatttaactttcccatctgaaaaataactgacataatagggctccaaataggtgtgcaatgaatcaaacaaacttcatattagttcgaaactagaatcattaattagcttgatgaatttggttcaagaactaactgagttaaacttgaactgaaaattaagcttattaattaaatgaactgaacttcagctgaatattattcgattaatttgattcataactaactatacacacacacacacataaatgtttttaaatatataaaagtataagtacatttgataatataaattatctagagtaaacccccattctagtccttaatagttaatactgtaagcattggttaagttaatccttgacttcacaaaaattcaggtcattttattttacactgccatttttgcacaaaaaaatacagaagtaaatacaagttttataagaacttgagcttgcaaactcatgaactgaaccaaatagtccttgaatttaaatcaagcccaacttgagtaaaaaattgattcttataaacctgaacttgaatttgaatcaaaccaactcttatagagttcagccaagctgagtcaagtcaaacttgactcaactcattttcagcccaagctccaaatatgtgcatctctttataagctgtacattattatcatcactatttacatgggcagatataggatcaattgactgaaatttatgagtagcaattggcactagcagtgatttgtgataacagtacaactgaaaggtagaaatgtttcaaatgaattagaatttgtatcttgttatcccacttgcaaaacactgaaacagcaaaagagcactatagttatttatgaaaagttagtgggtaataaaattcttaaacaaagttaaaatacataaatttattttaatttatgaaacaaatttggttcagtttattttattgattattttttcttctcatataaattattgatgagaattttatccaaattgagtcaatgcctataaannnnnnnnnnttttggtttataaaatcaaactaagttaaatttcatgtaccgtcaattgttattattataattatttagtattattaattttttaaatatccttatcccatcactctacttctatattataaattagaataagggagaaagtgaaattgacatcacattaattattagctttaatttttatccattgataagctttacacacacacgtagtatataataaaataaaattaaaattaacaaaattaaagaaaagagctcctgcaaaagaaatacctggccaaagctgaaaacttgatttaatgcactcatgaatcaaaccaattttctaagcatttaatgcactcatgaatcagaccaattttatatgataacttgatagcataagcaaaagatttagctttaactaaaaagaaacacacgtaatatctagtcttcgaaaccacgagaaatccatgtaagggatgaataataaaatcagcaaaaaatattaaataatgcaccagtatgaaaccttacggaggtaaacaatataaaagtgtctgaggttagaatttgaacataccttacggacgctttggaagatctaccttgaccccgtgcataatctgaaacgggttagggaaatgataaaaaaaagtggcaatcaaattagggaaatgatagtttcaacattaaaaaataattagattatgagtgagcattataattataattagatataatttgataaaattagtcattatttttagaatatataactagttatgaataaactagttatataagcagttatatctaaaattaattacataattaattatgaatgaataaaataaattattaaaaacatttataacaataaaactaaatttagttttataattacttttatatataactagttatataaaagtagttatagttatttttctgaaactagtttttttgagcaacattaggtttggtcctnnnnnnnnnnnnnnnnnnnnnnnnnnnnnnnnnnnnnnnnnnnnnnnnnnnnnnnnnnnnnnnnnnnnnnnnnnnnnnnnnnnnnnnnnnnnnnnnnnnnnnnnnnnnnnnnnnnnnnnnnnnnnnnnnnnnnnnnnnnnnnnnnnnnnnnnnnnnnnnnnnnnnnnnnnnnnnnnnnnnnnnnnnnnnnnnnnnnnnnnnnnnnnnnnnnnnnnnnnnnnnnnnnnnnnnnnnnnnnnnnnnnnnnnnnnnnnnnnnnnnnnnnnnnnnnnnnnnnnnnnnnnnnnnnnnnnnnnnnnnnnnnnnnnnnnnnnnnnnnnnnnnnnnnnnnnnnnnnnnnnnnnnnnnnnnnnnnnnnnnnnnnnnnnnnnnnnnnnnnnnnnnnnnnnnnnnnnnnnnnnnnnnnnnnnnnnnnnnnnnnnnnnnnnnnnnnnnnnnnnnnnnnnnnnnnnnnnnnnnnnnnnnnnnnnnnnnnnnnnnnnnnnnnnnnnnnnnnnnnnnnnnnnnnnnnnnnnnnnnnnnnnnnnnnnnnnnnnnnnnnnnnnnnnnnnnnnnnnnnnnnnnnnnnnnnnnnnnnnnnnnnnnnnnnnnnnnnnnnnnnnnnnnnnnnnnnnnnnnnnnnnnnnnnnnnnnnnnnnnnnnnnnnnnnnnnnnnnnnnnnnnnnnnnnnnnnnnnnnnnnnnnnnnnnnnnnnnnnnnnnnnnnnnnnnnnnnnnnnnnnnnnnnnnnnnnnnnnnnnnnnnnnnnnnnnnnnnnnnnnnnnnnnnnnnnnnnnnnnnnnnnnnnnnnnnnnnnnnnnnnnnnnnnnnnnnnnnnnnnnnnnnnnnnnnnnnnnnnnnnnnnnnnnnnnnnnnnnnnnnnnnnnnaaagctcaagaaagccagtaggaatatgaatttgagacacacaaattccttcatagaaaatatgacatttatttatttatttttataaatcacattttccatcaatgtactctttaagatgaactgatcaagcaatgacatagagataaagatagaagaaaatatcaagagaaacaaagaatagaagttatggagaaacaatttgggatacatagtatgacaacatacagaaacatgagatattttcctgaaagagccagaataacagatctacattgaaacttacatgcaattaccatagagacaaattttagttactctaatgctgatagagacaagggaatgatgaaattaccatagagaacagagaggaaaattaaaaaaaaaaaaccttaaattatagtggtactcatcagtagtacaatgccataacttacatggaatgctagaaagagaagaaagatgacacttcagtagacgtatagcctcttttgaaccatggtcacacaaatcaagcaccatttcttttgcttctgtttttctgccaataaatataataaaagaaatattgtattacttaccatttaaaaagaaaacaaaaacttaccaaaaaattttcaataacccaacctccttaacaaaatagaaaaatagaaaaaaaaaggcagcaatgcaaatttaagagcagagtatactaacctggtttcgagaatcattttgttagattcttcattagcatcgtgagcccttcttagaaaaaattgccctgaaacttcaacaacaaacttctgagtggcaacaactaccaatctagtcctgaaatagtaatgataatttctagtgaagcacaaaatatattatgaacaagacatataaggtctaagaatccaacttaatgtagaaataaatctagaacatgcaagtgtgttgttgttccgtttcttggttcttgacggaggaactccagaacctactagccaaagaggaggatctgtatgactttcgatggaagaagggctagttgggccagaggggtttgcagcggcaggggttgttgaggcctatccagtagcagcagaaccagtggcggcaccgagtgggagctaagtcgtgtttggtggtgggttgtttggaagcgcgtttggctcgcaccgagtggtgctttgccgccgcctcgcagagaaggatgagtagttggtccttgctcaacggctccagaagcttggagattgggtcgtcgtgttcgtgttgttgttgttactgctgctggtgttggtatccaaggagaaagagannnnnnnnnngaaagctcaagaaagccagtaggaatatgaatttgagacacacaaattccttcatagaaaatatgacatttatttatttatttttataaatcacattttccatcaatgtactctttaagatgaactgatcaagcaatgacatagagataaagatagaagaaaatatcaagagaaacaaagaatagaagttatggagaaacaatttgggatacatagtatgacaacatacagaaacatgagatattttcctgaaagagccagaataacnnnnnnnnnnnnnnnnnnnnnnnnnnnnnnnnnnnnnnnnnnnnnnnnnnnnnnnnnnnnnnnnnnnnnnnnnnnnnnnnnnnnnnnnnnnnnnnnnnnnnnnnnnnnnnnnnnnnnnnnnnnnnnnnnnnnnnnnnnnnnnnnnnnnnnnnnnnnnnnnnnnnnnnnnnnnnnnnnnnnnnnnnnnnnnnnnnnnnnnnnnnnnnnnnnnnnnnnnnnnnnnnnnnnnnnggagaaagagagtgacggggtcgattggaatccaagggtttgaggagagagagtgatggacagtggctttcattttagggagaagtgagacgcgaacagaaattaatgagcagaataaagtaccaattttaaagacggtcttagcacaaacccgtctttgtatcctttattcctaagacggttatattataaccgtctttgtatcctttgaatatcgtcctataccttgtaatatttacaaaactgccaccgcctcatattctaagacgggtttttaggaaccgtcttagaaggtgcgtcctaaaaggtcccttttctagtagtgacacattgtcattatgcagcaaaacaatggcctactccttatattagtcgaatgcactgatatactaattccatgaggttgaccatataacatgttgacctaggagaacattcaacattttttttattgtttataggtttgtaacttagacagttgtaatgacatggataatgcatgtaacactttagtaatcatatttgcgtaatgaagacattttttgtttccgaattatgagagccagatacaaaataaacacatatgttaatcatagttagatacataatcaatgaaataatacaaaatcatcatccttgtccaccaccacctttcctctatgtatccctcattcatcttgaccgaacataaacatttccttgctcagtgacacccatgactaatcttatacactggtctgttatagtgtatgcaacatttccagcagtcaccatccttatatataatatgtgttgcaagctttctgctatttttggcaaacagcctaagacaatttcaacaacgcgaataataactaatgaaatatttaagaaaaattttgcttaacaaaattgtaagtatattataccacttcatgtcgaggcatcttagcatcaataagtgttgctgcaagtggatgtggcatagttgctctatcatcaggcaacaaaggtggatgtggcataactgttataggatcatgccccatgggaggatgtctaggaggctccctaacctgtggtggactcatgaatggatgaaatatcatataaaatcacttaatatagtctggagcacactgagcaagaaaagtaacaaactctcttatcaatgcaagatattgtgaaaaatgcagtcatctatcatcaatgtcccctgtggatagaaattgagaactattgagtggaggaatggactaatcatagccaaatctgtaaaaaaaaaaaaaaaaacttaaatatgtaagttccataaccttcaaatcacaaagggtattttcgtctgcacactattcacatatagtgtattagaaatatatatagtgtatagagcaaacccccatatctttctttgaagttgtctatccttttagtgtgttttgggctcggcctaactcctaacacaccttgcatggtccctacgcatttgggtttttcttcctgtacccaacaaatctcaaatactccattctttttctctttaattccaagattgtccttttgtacttcttcttccttcttttcgttttcaactttttcttactttgttgagctcctccttctattggtttgtgatggtttgttagctacattgtggcaggggtttgttacctgtattgactttgtcgtcgtcatgacgtcgtcatcagtgttgcaataagttttttacatctgtaaaatactgatatgtatgagccatatggattgtcaatccgtatggaccatacggatcgtcaatccatataaccatttacttcttttaaaaaattataagctatttttttaaaaaaaaatagttaaataacaaaaataggtcatattgtagaaaaggtgttatttattaatatatttgtataaatattattacattaataacattaaatatttatataaatagttctttcaagtctagaaaatttcaaaataaatttttacattgatttttaaatatataatagcattaaaacatttatttataatatatttaagataataatcaaatatggaaattaagatataaatcattatatatataatatgcgtatccatttcaatgtaatatattactatattagtatatatttgaatagttatttttagatttttttagtaataaaaaaaaagcaaattatatgtatacacgaaaagattccttgtaccaaaaaaataataaaattgtgtcatactatatgtctttctttgagtgtctttgcgctagttgttactatgaaatagttgaaagcttgtttctttcagatgttgttgttttctgtcgattcaatcaaaaggaaaacaaatcatggtcttagaaaggagttttagaccttcataaggttattatgttaatgatgagtgatccaactgatatttaatcatatcgattccaaggttttgattccattcttgttgatggtcctttgtttgtaggtcatggtgaaaagtatcattgtaaaccttatatagagttattacttgttacatgttttgatctttacatagagcaacatcaaacttcttccacaagaaaaagaaatcaagttaaacaataagcaagatcttgaattaataagttttatcttcaatatatatccaattcaaattttgttatatagtaaaaaaaaatgtaattaacatatgaaattataagagcaaaattaactgtcgtgcttagcttgtttttattgttagggattgatacccaaagaagattgccttgttggagaagtgtgctttgacagccagctagaggaatgtttctactttaagcaattgtttgttaccatagaaaatggaacaaactgatgaaaaataaaactaagattacaattagatccaagaaaaatcaacaaaaaaaatacaattaattctcacaaaatcaacaaaaaaatttaagatcattcttgttgaggttatgttaaaaacatgctaatatgaaactatgaacaatttgttcatacaacattttgtgctagattagtggggttattcaacattgttttatatggtttgtccttgtaaaagtcatgttgtagcatattaaggagtgagtattagtgtgggagaggaagtgcaaagagtacttgagaatactccttgtgtaatcaagttgattatagcaccccaaataaaatcaaataaaaataaaagaattagattgtcaatgttaaaagaatttgataccacatttaagtaaagattctaatgccgaaatcgtgggttgctagatgatattgattttgaaaggagcaacaaactatcattttacatttttttcttggtatcataaatatatgcttaatttgttacacttttattagttgtttttttttttatagtcaaaaaccaaaatttataatctaacttgttgacattaattccccataaccatagttgtgaaattcgatctaatcattcacctgattggggtagtgggtcagtggtccaaccattgggtcagtaattagcctgatttgaaccaatatatattaagaaattaaaattatatatgtatctattatatataagtatataactaacattatttgagtaaaaaaagttatacacactccaaaatccaaattaaaaaaaaaaaagaacaaatcggaccgatccaaccaagatccggtgattgacctggtcaaatttgaccgggtcaactgcttaaccggtctgaaagtggaactgacccgattaggtcaccggatcccaatccgaccggccaatccagatcggatttgataacaatgcccgtaactatatatatgcacataatttatcacttcattcacttacaagcttgcactataatcaaaacattttaaaataatttttcaacttggaaaatataaggacaaatgaacagggttaacttaaaataagcatcaacagattacatacaacaggtttatttgtaccaattaccaatgttatggaggaaatttctaatgttgggttcagatgattcaatagaaaccatcccactcatgaaaaaagaaaagtgacaacttgattgacatggtcaataaatattgcatgcccagcacctcagcaaccatctgtatcaacatttccaaatcaatattatcaataagaattgtgcagctctgtattaattcaaaacaaaagaattgtccaatcattttacttctataacattaatttgcctcaataatccatcataccaattgcaccactcagtatctactagtaaacacaaaagaattaatatcatgtgtaaagcaagactaagtatatgccataaacactaagtccaaaaataaaatcaagaaaagacagtctctaatcaaacatattaaaatgtatccttttaacaaatgaaaacaaatttaaacaaaatataaaaaggttcttatactccactataccaacaacaatctaaattaagaaaccacataactttaagacaatataaaatatcaacctttatataaatagaaggtttaattatttaagcatgttccaagttgaaaagtaaatccctgaaactttcaaaaattataaaagggttaaatatataaatatagacatgtttatgtttagtatttaaaaaataactcatctaattttattgcatccatttttgaaatatgtaatttgtagtccctattttttcaaaaaatagcctcttattaatctctaacttatagaaataggaaccacaaaaaacatttccacaagattaaaacgtgactttataatccaactctttggacaatccttccaaaaaaataaaactcttcgccaactcttaagaactcacaaaatttaataaatggttcttcattactattcattcaattaaaccgatgttagcttatttaaatgtcaaataaaattaaaccccatgatgcaaagtaccagttaaaatttgaaatcatgaagtagaaataagaatataatgaccacattaaaatttgaaatcatgaagtagaaataaaaatataatgaccacacaatactttctcataataattgaagccttcttttaccttctggatggttcctacttcctactcatgccacaattcatattatcacttcatcatttatcttgatagcaggaatgtgagcaatcttagaccagtgtttccctttccgactttgataccttgcttctagtaaaggacaaccatctatcttcagtaattcaagagaggatggaagctgatcttcgggcaaggactcgaggcttttacaatacctgatggatagctctgtgagggaagtgaggtgttggagcccttttccttccaacaactttaaatcatcaaaattacggaataacagagattgcagcgaagtgggcagtaagcactccttcaacagggtgttaacaacatcttcctccccataaccacgaatggaaagaagagacagagaagtgaggcgttggaataggaaacctaactcgtgtttagacattgatgatagaattccaacatcaacatcgagtctttgtaaactggaaggtaaacaccttgggggcaatgatgttagctctggaagcccagaaagccataaccatccaagggcagggagatcaatctgttctggaagtgacctaagtttcttacaattcaaaacattaagataatttaatttgagagcattcgttccaccttgagtagtaattgcttccatgttcggacagtcccagatttgaagaatttgtagggaagagaaaccatctaatggtaaggacgccagggaatggcagcttttgctatttgacacacattctagtgatgtgtatttgtggcatgattcgggagacagaaattctaagttctcacagttgtaaatttcaagtgattgcaatgacgttggcaagccatcagttgggaaggaaatcaaattggggatatccttaagaatcaaattttggagacaattggcagctagtatcattcttggcaaaggtgacaagctgtcacattttgcaatccgtagattcctataagaaaagttgtcaagcaaggacagcaagtcttctcctgcgtctctaaacgttattgcttcaattgatgtgttccaatgtagatcatgtgattttgcctctagccggttgcactctgatatactaacctctgtcaacgaaggtagatggttgggcaagtttcctctcaacttggggcatgttgataaactcagacgcttaaggcaaggaaaaggaaacttgctgccttcaccttcaaatggtagccactcttcccactctgacatctcttcgaactggatactctccaacaatggaaatggttgaaatgaaagggaaaccccattgttgcagtagaattcttcaccaactgtcttcaccattttcatcctttttatcacaagctccttgagagaaggtaattgtccaaatggtggaagtgaaaagcaatagttgcaatcagtgatgcaaaggactataacataagaatatgaagagtcacccaaccatttaggaaagcttgtgccactgtagtatcttatgctgaatttttttaaatttgtcgatggttgcaggttctgaagtacatctttctcaacttgtgaatcttgtggctcactgccccacttcagcgtaagctcctcaatatgctctttcttctttaagtcagcttgaaaagcatccttgggatcaacaacattttgtagtctcaaaatagaaagcgtaccttgcaagtaaggaaactttcttaattctctgatatttactccatcttctctgcctacaacaaaagaagtcaacacacggagatcttgtagcttgcttatttgtgctggcatatctgacaaatttgtgtctctaatatcaaggtggcgtagattgaccaaatttcctatctgttcaggcagctgagtaagacatatacaatttgacaatttcaaagtctgcaaattgtaaagcctaaaggttgcatcgggcaacctcttgattgaagtataggaaaggtcaagatacctcaaaagcaccaaattgcttattgaatcaggcaactcagtgatatttccatagtcaagcaaggacaatgttcgcaaatattttagttttggcaaccaatcatgtgacacctttttggttacattacaataacagccaggtccatatttagagagtgataaaaaagtgcgcaaaaactttaggtcatacaagccctcaaatctttcagagacgtcaaatcgtcttgaatgaaatgctaattggcgaacacctcctgagattttattaccttccaagtagcaagagttttttccagctattagtctagccaaatcatagatgaggtcatgcattcgaaacttatcctctgcttgagttttgtctttttcaactaaagatcttgataataattcattaaagtagtcatcacctgctgattccattgctttctctccatggatttgttgaagaaagccttcagccatccataacagaatcaactccttcctatccaacaaatgttgttttggaaaaattgagcaataagaaaaacatcttttcaaatgtgctgggagatgaagataacttatgtgtaaagctggtaacacctcttcatgtgcccataagttgctgttcagaatcctattccattcttttgcatcaacatttgatcgcaaaagacctcccaatgttttagcagctaaaggtaggccattgcatttttttgcaatcttcctaccaatttcttctaggattggatgttcatcgtaaccttcattgccaaatgcatgttcagcaagtatacgccaacaattgtcatctgttagatgtttcagctcataaacgggatatgtatgtgtcatttgtgcaactttctgttgtcgagttgtcacaataatcttacttcccttttttccactgctaaaaggtgctattaggtgatgccaatcgttatacttttcgttccaaaggtcatcgagcacaaccaaaaacttcttatttttcaagctcttcttcaactcaacacgaagagcatcaaaatcagttctattacaatttttagaagtgacagattcaacaattgtctttgtcagcctaaacacatcaaaatcatcagatacccatgcccaagtggtcaaatcaaactctttctgcactgcaatatcattataaaggcattgagctaaggttgtttttccaagacctcccatgcccaatatcgttagcacttctatgttattattcttctcatcttcatcagagagaagcatgctcagtagcttctctttgtcatcctcccttgcaacaacaatagattcaaccaatgaatctgtaactgttttgtaggagactttcctagaaacactttgcaaaccaagaatatccttttgtttcataaaatgttctagccttccagatattgcttcaagcttggaattcatgctcttatgcaattgattaaaggtagaagaaagtgatgaccacacctggctagtaaaggttttaaattctccctccaccttgcacctcagagaatctgtgttgatttcgtccaacaaatcctctgcgtctaaaacagcatctttcaactcatcaagccatgccttcactgctgaattagtgatctgtttctcctcagcatcattgagcacagcattgagtgccaacagctttatcttcaggtcatccaagagagaaacattgaggtttctgttggcaaagaaattgcgaaactctgtagaagttatcctatccagcaagatctccacagaagcagagataagtgcctctcccaccatagctaaggccatttcttctctagttttgcaaatagtatcagatctctgaagctttagtcaaacgctgaaggtgatatggtagctgcggaggaattaaggtattataatataaacgcgttaaccactttcttttttatcataaataaatattttatttgcctctgtctttgagaaaacaaagaatagtacaatagtttatttcctttaatgtgaccatccaaccactctacatttggactttttcaatgtatacttcttcggtccttcctgatttcttctgcctatgaagtgtaataatacagtgaatttaagaaaaaaaaacttaaataagagttaattatacatttttctgaattcctaaaacttgacacctccctcattcctcaattcgtttgtttaatgcttttaaatcaacattcatgatttcatattcaattatgcaatattatttgcttagtatatatcttagatgccatatatcatttactctcttaaactttcttaaacggcctacactattgcgcatgtaattaatttgttgttgaaagagttagattccctactcttttgtctttaattgattcggaatccttataagaaatgctatgagattaactcttaagaacattgaaacattgcttacaaagtttgctgtgtgtagtcaattttcactttgacaaagtttgtattaggtagttgaaagtttcactctcttccgattaaaggaatcaaatttttagaataattacttatgacgtgtatttttttaagatgatttttttataaaaataaaaataattacactttaagatagaggtgtcagacttacttttattatttatgatgattttgagccaccctagctactatcatgttaattattttttacaagaaaaatacttgaaagccagttccttattcctttattgtacgaaagatcatgagattctaagcgtccatatcatattctcatacctcaatacatgaatttaaggatactttataagagaagaaaattcgatacaactcaacattaacattatagttatatatacacacaagacaagggaagcaagtacttagctaaaaagaagccaagccgcaagtactcttgtttggaattagaattaagagaacgaatgaacaaaagtcaataactctacaaagtacaatcaccaaatcatatttattcaacttacatcacataagaacaacaacaacagtactagaactagaagtgagaaattaaagacttcttttttttttatttctttttttacaataaccagatttgaatccatgatttcatatgcatattatccaatctcactaccactagacctaaaatgaaaagttaaagacttttttgttttttgttttttcttataataatgagatttgaatttaagatctcatacatattcaaatcccacaacaaggtcagggaagaacaatcaaaggttttatttaattggtagctgaaatttgtagtactgctcttgacctactttctgaagaagcctccagccaagtttgcaagaccacctaaaccaccaccaccactttcaccactttcttcaccttttgactctgcaggctgagaaggagcaacaccaccaccctggtgattatgtagataatcagcagccttgtcaacatatagtcctatgcccagtggcggacccacattcaagctcctgtccgcaagtgcggacacaaaaatctgtagatctgatttcttttttttggtttacggctaatcttgcgccaatccctacaacacacctaacattacccattgccaccctactttgtgccctaaacccccgtcacaaatgtgcggacataaacaaattttcctgggtcggccacttcctatgcctttgcatattaatcataggatttctaggttccgctttctactctgtttgatttcgttgtcttggtacatgcaattcattcttgtgtttgagactgggaggttgaaggtgcattttaaaaaaatatttgggaactgatttcgttgattgattgaggttacatgaacaattcgttgataatatatacaatagagattgtgcagcatggtgcctacaattgtggagaaaattcaagcagtttcatgaacttggaatcacatttatagggtgtctttatcccttgttgatttttttcttttcttttgagaaatgtatcaatgcatcaaggcaacatttaatccttcactgagcacataaaccagccaaatgatgatgtgaagggtagattctgcatggttatgcagaattcttacaagttgctccattaataagcccattggaagccatcattgatcaatttaggtgctttgggcatatgaattatcactaacctgttagctaatgcttaggggtagaaacaaatagacatagtcatgctagagatgactcaaatgttctactttacaacattttttttcttctgagaagtacttagacatatcaccataataatatgtaattggaaattgattttgattttaattattattacaaataaaaatgtttaccttttagcattttgcgagttaggtatgtcagattttggaattctggttaggctagaagtggatgcaattgaatctcaaggagggatttgatttttttttttgtttttggtgactgatagcaaaatatatactgagtatagttacttacacatgcacttgttaaaaggcttacaagaaaatttaatgattgaatcaccattgagattttgtgttttgactcagtagtttattcactttattgatttagagcttgttcaatcatacttgacccaaaaaaagaatttaccttttgattttggagtcatatgactcattatgttgatcatattaataataatacaccattcacctatgcatggattgaatctcttagatactgaccacttccgtttcgtcctaagttttgtttgtttggtattctttgcctcctacttttgttagtttgcaccatttttggcagaaaaacacgaataatacatttttaatataaatttactaatttgggactgtttggaaatatattataactttggggcagttggtcacgtccaatttggacaggggtggtcacgcccaaattggtctggagtggtcacgtccaatctgggtgtgttccaccccagggtgacacgtggcaattcaggtacagcacggtgttttcgtaaactttgaaagaccataacttttgactaggatgtccgattgaggcgcataatatgtcaaaacgatcgttgtttcgaggagaagtcgcaaataaatcctagaggggacttggtcaaatttttttcccaaaaaagacctctaagtgcttcaaaattgcgattttgtcttccaacctccaaaaaatttcccgtttctaatttttttctttattcaactagtgaattgcatggtattttctgtttttttgtttacttcaattaatttcgagcgttttgacatatcgtacgactccatcggatatttctgtcaaaagttcgaccatttgaaacttatattgcttgtttttttttatttctgtcaattttattcaattagtgaattgcatgttatttttttatttttttaattatttctattaatttcgaccattttgacataaagtatgcctccatcactaaccctagtacaatacttattttaaactgtactgttttttaatttttttattatttatattaattattttttttactgtactttttttaaataagaaaaatacaaatcagttctacaacaatttttgaacattttgtcaatcacataagaccatcactaaccctagtacaatacttattttaaattgtacaggctaactaaaactatacaaccaaattgtaacaggaaggaatccctaaggtgaaaaaattgaatgggttttttaaaaaataaattaacaaaattataattttgtttaatgaaatttgagtgaaattttattttgatttatgtaaataatgaatcatgtaatttgactaggatgtccgatggagacataaaaaaataaaatacaatcaaaattaatagaagtaataaaaaaaaagcagcatgcattactagttgaataaaatttacaaaaaaaaaaaaaaaaaaannnnnnnnnnnnnnnnnnnnnnnnnnnnnnnnnnnnnnnnnnnnnnnnnnnnnnnnnngatggaggggtacgatatgtcaaaacgcttgaaattaattgaagtaaacaaaaaaaacagaaaataacatgcaattcactagttgaataaagaaaaaaattagaaaacgggaaattttttggaggttggaagacaaaattgcaattttgaagcacttagaggcctttttgggaaaaaattttgaccaagtccccttcaagacttattagcggcttctcctcgaaacaacgatcattttgacatattatacacctcaatcggacatctcagtcaaaagttatgaccttccaaaatttatgaaaatatcgtgctgtacctgaattgccacgtgtcaccctggggtggaacactcccagattgggcgtgaccacccctgcccaaattgggcgtgaccaactaccctaaagttgtaatatattttcaaacaacctcaaattggtaaatttatattaaaaatatattattggagttcttttaccaccatttttagaaatatggttgtaccatcagttgcaactcttccttaaacccaatgatttactcttaagtgccaaacaagccatcctttaatttatacattttctattactacttccagttccagagactttggcataagtctgatctctctttttatttgaacaaaatcagaatacatctctaattcactggtttagtatttttattttttattcgtaaattgatgagtaatccaagccttcgattactcttgtgctgatataataaatatttattatacataatattgatcgatgcttgtactacggcctaggaccatacataggatgaagacatccagtccaatctgaaactgccaggccaaagattattcggacctactctgcataagtcactgggggccaatgggaataaaatgtgttgccctctcatcattatctaggttgtttagttatggagagaatatgagagttgtacaactaatgacttaagcgttcaaagtttcaatttatagttgtccttgtaaaaatattgaatagctagaaatcatatgctttgctaaaattataagttgttatctcacttatttgcatgtacttcttttaccctttttttcatgattttatttactgaatttattttctcatgatttgatttgtatcatcaatattttataaatttataaatgaaggttcttatatggtggtgcttgtaaattctctatatctatatttttgaataattattaaaattattttgaattatgatatatttaaaaattagttaaatatttattttcatttaagttcaatattgaaattttaatttttaaataaatatttaaaaacaaaattttacatatcgagcaaattgaattactctatccaaacaagtaaattgaaatacaaagaatttgaaatgatccaaacaaattatttgtaaaatgaatggaatttaattacaagtaattcaaatgttatgtattttaattttcttaaattactaaaattctccatccaaacatatggtcaaggtttcaaagaacacatcaaaggaggatccgaggaatttcttgaattcattgacattgtttgttgttgggattccattcctaactttgttagtagctctattgtgttaccttgccattttggttactctaatttagaaagccctatctttggcctccaaattccaatactcctccctatttgtttcacaacattgaacacttcaagaattgattgctctagttgtcctttaaccaaatggaaattaccagagaggctatggaattgggtagccatgattgtattgtgaagggtggtagtagtgacattttttttgtctaggagagagtattttgctaatgtccaaacagaatcataagcccacaattcaaagatggttacattggttctatatcttgggttttgctacatacactatatatatttctaatacattatatatgaatagtgtgcggacgaaaatacctttcgcgatttgaaggttatggatttcataaccttcatacggattgacgaatccgtaagaaccttacggatttttcaattcatataagttttttttacggattggacaattcgtaaaaaaaaaacacatacaaagaatttgaaatgctttatccaaacaaaaattatttgtaaaatgaagggaatttaattacaagtaattcaaatgctatgtattttaatttccttaaattgctagaattctccatccaaacatatggtcaaggtttcaaagaacacatcaaaggaggagttgaggaatttcttgaattcattgacattgtttgtcgttgggattccaatcctcaactttgttagtagctctgttgtgttacctgaccattttggttactctaatttagaaaaccctatctttggccaccaaattccaatactcctccctatttgtttcacaacattgaacacttcaagaattgattgctctagttgtcctttaaccaaatggaaattaccagagagggaatgaaatttggtagcgatgattgtattgtgaagggtagtagtactagtgacatttttttgccgttgggagagagtattattattattactattttttctccaaactttttccactttcttggctaatgcccaaacaaaataataaccccacaatccaaagatggttacattggatccatatctttctttgaagttgtcaagccttttagtgtgttttgggctcggcctaactcctaacaaaccttgcatggttctcatgcatttgaatttttcttcttgcaccaacaaatctcaaataaaatcatcttctttttttaattccaagattgtccttttgcatttattctttttccttccttccattttcaacttcttcttacgccattcagtttcttcttcttacttcgctaagctactctttctgttggcttatggttgtttgttagctacattgtggtggtggtttgttacatgcattgactttgttgtcatcgtggtgggtgttgtagtggcaatgacggtccagaggtaagttttttacatatgcgaaatattgatctgaatgggctatacgaattgcaaatccgtatacgcatttacttctttaaaaaaattataagctattttaaaaaatagttaaataacaaaaataggtcataatgtataagaaaagtgttatttattaataaatttgtataaatattattacattaataacatgaaatatttatataaatagttctttcaagtctagaaaatttcaaaataaatttttatattgatttttaaatatataatagcattaaaatagttatttataatatatttaaaataataataagatatgaaattaagatatatatatatatatatatatgcttatccatttcaatgtaatatattaatatattagtatacatttggatagttatttgtagatttttttgtagtaacaataaagaaccaaattgtatgcatacacaaaaagatttcatgtatcagaaaaataataaatttgagtacaactgttgtgttgaaacacacacacacacacacacacacacacacacacatatatatatatacacatcaatagtacagttgtatatttccttgttacattattactttttctcaagtgtaaaagattttaaaataaatttctacattgaagttttttaaaatatatagattatttttaaaataataagaattaattaaaagtaataagaatggatatattttattaatagataatttattattatgtgtacatagaagtatcaattattatatgtcaatccgtataggctatacatatcaaatttcattagttttccttagtttgtcattgagattttttttcctttttaatgttttgttgagatggacgaagatgagtggatatatgagaacattatgacaaaagaaattaatatgaatgaagacacgggagaggaacttgttgtggttgaaaatattgattattttgatgccttcaatacttctcaggtgtttatataattttttatttggttaaagtaagaatatcctaacaagactaaacatgtattgtcctttttgtaggtgtttcctatccatgaggacgtattgtgtaacaccccgtgtgcacccggtgcgttatccttatcaatatcagaatcgcgctattcgcgtcataaagaagcggtgcgaaaactcaagaatcgattattcttgattacattatgtatggaaatataaaataacacacaacatcatacataagtccctgttgatccaggtacatcacatacactctacatctaggcagatatacataattcaatacagagataatcaggaggaacataacttataccacaacataattagttgtacatgacagagatcaacaaagctcttctcgtcttcatccacagccctgaccctctccagcactctatgctaggcatcctgctctgagtatctcctatcctcagggatacctgaaaaccacaaaccccataaagggtgagacaaacgtctcagcaagctcagggttctgggaaaacctccctcaccctggttcacctctatacataacatataacagggctaagaacgtagttctagctcacacaaccaatcctagggcctcagcctagataatacacatcccagtcatttggggtcataaccagggttataattcccatcagaggtatcacacctcagactggctctacagccatctcaatctatctaacagagccaagccagaaacatggcttaaatatctgatatcggctctcaccatcatctcatagagattccatagttacctcatagaggtactctaacataagtgtcaatatccggacacttctcatacccgagaggcacaacctctccaaacatacatacatggcctgagaactctcactcagggcttactcatccatacaatcctctaccgtctgtatgaggatacatttgtataacaggaacaccccataccggtatctccacaatccatatgaggctacatctgtacatataggaacatctccctaggaggctacctctatatgacaggaacatctcatatcgatccatcctgcctaggctacatttgctgatataggaacatctccccaggaggctacctctataccgcaggaacatctcaggccaggatcactctatctagcagaggctcatccgaatatataggtacaaccacgtctggaggactcctatataacaggtacatctctgtaatgaggctcgtccgagtatataggtacaaccacgtctggaggactcctatataccgggtacatctcatgccctatcacatacaattgcctgaggaggctacgtctgtggatataggaacatctccccaggaggctacctctataccacaggtacatctcacaacaggtcttacacaatcacatactatctgtcctactaccataggacgctattctctgcatcagagaatatacagagatcagacactatcacagtgtccgcttattctcaactcatacacagaccaccactatggtccatatccatatcatcatctctgcctaaggaaacatccatccttaggactttaggcggagagcagtggcacctcccaaggaatctcagctattccagggagtcctcaaactcttcctctggctagggaatctcagctagcctgataccatcgcggtatcctatagattccatcacagatcctgctctgatctgtatcacatcaaatcctggaacacagcatagtgttcatccatctcggctcaaggccatacctacaaccacaggtgacaacatcctcacaccatctcggtgtttatcctagtgttcatccagccttctagactgatacatacctatcctcatcaatatcaggccattacggcctttcttcctcagcatgcatcatacaggtatatctacctatacatacatatatatatatatatatatatatatattcttacacatagcatgcacctatcacccactttggtggcaaacaagagaaagagaaagctaacacagaacgatgagcttacctggcaagccgtgcccctcagcttagcctcaactgatggtctgctcctatgacatcccagtgtcaagccctacacaggcatacaatcgcatatcacagaccattcacgcagctaaacataccaaaagctcatctagcagtcattcactgcctctgggaagaaaccacagttctttcccctcaacccgagtcatctactctaggtttgtcaggcttatccatacaagccttccatagaccttcaatggtctatctcaggttcgttcatggcctcagagtcaatctagactcatacacaagccattcatctagagcctctcagctctctcaactccaaactcaaggtttctcagggcttgaacggtttaaaccaccagacaccgttctcaaggcccctcaggcatcacaagcccatcacaaaggctcttgcatgtcacaaatcaagtgactcagtgcaagtcacacatgcatagtctagagccaaaaccaacgttattcaaaacacaaattgaaagctaatccttcctcctctcattaatcgaaacacatctctcaactagacccaaagctaattctagctctatcacagatgggtcactattcatcataaaccccaaatccaaaatcaaacggagaaactcgagtttcttacctcagaactgcagaggaaggcatctgggttactctcccaagccctggtgtccatgatccaccgccgttcctcgccagactcgagctcttcacctccctttctcagaggatgcgatctctggggttttaatgaatagaaaggaaggattctcgctctcacacggtttctcggaggtttactggggcgggagtgtttaggggtcacagagcatggccatgggagcttgggaaactctcccatggctgctggacattcagaggaagaagaaaaccaatttcttctcctttaaaacgcgacccccctcttatataaaactgcaccgaccttctggcgcgatccgcgccagatcccgcgctaaccgcgccgtgttcaaacttatggcgcgactcgcgccaacctcctctgccagaccacgcttccagtgtcagggtccacgcccccagcatggaaaaccagggaaacagactttccagggcacttctggcgcgatccgcgcggcccttggcgctacccacgccacacctcaaacccgcgccatccgcgttaaactctacgctttccgcgccacacctccaccagggtttttctcctttaaactgtggcgctaacagcgccatctgtggcgccaaccgcgccggatctcagggtcttacatattgcaatgggatcgtactattgcttatgatattggttttgtggctatgataacgaggtctgacacatcaattgaaaagagaggaaggatctcatttattttaattggttgtaagaggagtgaaaagtataaagcatacaagaaagatatattacggacggtgactagcactagaaaatgttgttatccttttaagttgcaagtgaaaccagtcacgggaggtgaagggtggatgatcaacttaatatatgggactcataatcatgctctacatttatagcatcataggtatgaaaggcacatcatcaagggttatcctcatctctcatatgggcaaatggaaacggttagtttcctcatcactactaacttctttacctaaagctctgcttgaaagtctgcctaaagcctaatgcaattctctcattctaaccttaatctattccccccccccaaacaaatattagtctaatacttcaaatcaacccacaacttcaagaaaatactcttaaattgaaaataaannnnnnnnnnatatatatatatatatatatatatattcttacacatagcatgcacctatcacccactttggtggcaaacaagagaaagagaaagctaacacagaacgatgagcttacctggcaagccgtgcccctcagcttagcctcaactgatggtctgctcctatgacatcccagtgtcaagccctacacaggcatacaatcgcatatcacagaccattcacgcagctaaacataccaaaagctcatctagcagtcattcactgcctctgggaagaaaccacagttctttcccctcaacccgagtcatctactctaggtttgtcaggcttatccatacaagccttccatagaccttcaatggtctatctcaggttcgttcatggcctcagagtcaatctagactcatacacaagccattcatctagagcctctcagctctctcaactccaaactcaaggtttctcagggcttgaacggtttaaaccaccagacaccgttctcaaggcccctcaggcatcacaagcccatcacaaaggctcttgcatgtcacaaatcaagtgactcagtgcaagtcacacatgcatagtctagagccaaaaccaacgttattcaaaacacaaattgaaagctaatccttcctcctctcattaatcgaaacacatctctcaactagacccaaagctaattctagctctatcacagatgggtcactattcatcataaaccccaaatccaaaatcaaacggagaaactcgagtttcttacctcagaactgcagaggaaggcatctgggttactctcccaagccctggtgtccatgatccaccgccgttcctcgccagactcgagctcttcacctccctttctcagaggatgcgatctctggggttttaatgaatagaaaggaaggattctcgctctcacacggtttctcggaggtttactggggcgggagtgtttaggggtcacagagcatggccatgggagcttgggaaactctcccatggctgctggacattcagaggaagaagaaaaccaatttcttctcctttaaaacgcgacccccctcttatataaaactgcaccgaccttctggcgcgatccgcgccagatcccgcgctaaccgcgccgtgttcaaacttatggcgcgactcgcgccaacctcctctgccagaccacgcttccagtgtcagggtccacgcccccagcatggaaaaccagggaaacagactttccagggcacttctggcgcgatccgcgcggcccttggcgctacccacgccacacctcaaacccgcgccatccgcgttaaactctacgctttccgcgccacacctccaccagggtttttctcctttaaactgtggcgctaacagcgccatctgtggcgccaaccgcgccggatctcagggtcttacatattgcaatgggatcgtactattgcttatgatattggttttgtggctatgataacgaggtctgacacatcaattgaaaagagaggaaggatctcatttattttaattggttgtaagaggagtgaaaagtataaagcatacaagaaagatatattacggacggtgactagcactagaaaatgttgttatccttttaagttgcaagtgaaaccagtcacgggaggtgaagggtggatgatcaacttaatatatgggactcataatcatgctctacatttatagcatcataggtatgaaaggcacatcatcaagggttatcctcatctctcatatgggcaaatggaaacggttagtttcctcatcactactaacttctttacctaaagctctgcttgaaagtctgcctaaagcctaatgcaattctctcattctaaccttaatctattccccccccccaaacaaatattagtctaatacttcaaatcaacccacaacttcaagaaaatactcttaaattgaaaataaaatcatactaataaatgttctaaaatcatactagtatttattaaatgtagttaaaaaaattaaattaactttaaatgattaatcgagaatagtaaaataaagtttgatatttgacgggtttgaggttaatttattaaaatattttacagatattttttcaatttgaaattattttcaatcatgaattaaacactattctctctctctaaaattgcacaaaaacaacaaagtaaaattatttattaaacatgttggcatggtaattgtcttgagtatttagtctttttccttcttgagatttttttcccagattaataatctctaattaatggaactaataattgatgtcatgtaccaacaaaactaaaagatttatgtcaagttatagttgtatctttaataagatcacacagttgaacatttcaattctcttatttagagtatgttcaaaagaatttatttgaacttactttttgacaaaaaattgtgtaaatatttgaaagattttatgaaaagatattataatatgttcataaattatgttaaatttatttcaatagaatctctacaatagcttttgaaaagaacttacagctcatatgaaacaattaattgaaattattttcatgagtactcatccaacaagtctttaattaaattgtttatccaaatggatcataattatatttgaaactttaagtgttaatataatacaaattcattaactataatatttttcactgtattgaacctatacggattgacaatccgtatgggtttaacaaggtaaaaaaacacacagtggcaaggtgagagcgatactcatagcggcaacaatgggacaatgagatgaaggagggattgaggaagcacttgttgatgagataaaggagagattggtgaacgggttgaagggaagaggatgagagactcgcagtggcgcaatgcaacggtgtgaaattgtaggttaatggtgtgagaggagagatggattagtaatccgtatttgagattttaagtgaagggtaattttgaaatttcactctttttttgggtgtacttgagatttactaggtgcaggaaaaactctcatgcattttatcaccataagatctaccccttaaagataaaccttcaataactattcatgcatatccaattgtcatatccttactttctttgcaacaagaaacaccttacacctaagctcagtgctcatgtgaacaagaaacactcttgtagccattaacttgagctttttgagctcattcgaaatctcaacgccacctaagccatgattagtgacacttctttaagacattcgggtaccaattttcccaaaggcgttgtttttgggttaagatcgttgccatattcggtgtcttcatatatatgccaatcattgacttggacaatggctgctatggcttcagcctgagaggaatcatctcatgtcgtgcaaatgaaataaggctttcagaaaagggaaaacgatgaacttggggtgaaaaatgagatcatgggcactctagtttcatttccaagttctatgatgaaccaagcttgttatgatgtttgaggtccaatgattgcatgcaccttctcatttaacaattcttaagctacgtagtgtcatcatggttatgttgtgtaagtaaatgctacaattttagagttaaattaaaggagaaatggtatggtgcatataaccaacatgaccatttaaatcccctccttggaaaatcttttcctctcgtggtatccctctcataatctcctactagacttcccaaaattggtttttttcatttgattgtagtctaacttggggtgcatacacactaaggatatttaaaaataaatcccccactataagcttaatcagcataatcatgttgtctttccttttgacgtcaacgactttatctctaaaacttctatcgattataatttaacaccattttgactcttggttagacctgtatatcgcaacttgaaactcgtgtcatccacttccttggccttttctccaaccgatttagtttcttgaaaacaaacaatatttactttccttcatgcaaaaatatctgctgactcccttaatatactcgttaaggttccgatgttctagcttcccaattgcatccttaacccctggacggtgtttttctgtcatgctcgcccatctgcatgttgggaccctgacctacttgtcatcaaatctaggtgaagacctgacaccttgccttgaggcaaggacgctagctcacttatcattacatcccaggatcaatgcaacgtcttgcctggtgcaagaaccctagcccattttttgctacacttggggcccaatgtaacacatctctatgaaaggtacaccctgtaacaccccagctacaactagggtcattaccctgacttaatcactattattgacgctaatcatcagagttaagcagttcggaagcataagaataaagaggacatcatcaaatgtcactatcataaacttttatacatcaaagtatggtgaatatacataaaatctgtgtcttttacaaaactatacaaataacaactctcctcaggtacaaaataaaaccaaagacctaaggtgtgcaaaacgaagctatccctgcataggcttcttgtcttgggatctatctgctcctcctgaggaatcacctgcaaaacataagccccacacacggggtgagatataaaatctcagtaaactcagggccgttgaaggtatttccttcccctggttcacttcaacatatacatgaatagcatatctaatccatcacacatggattcaatcatcagcacatcactctcacaatcattgaggaatcaaagtatcaaatcacattcacatgtcaacacccaggtgatccaaacacggccacaaccgttcatcacaaaatcaatctacccgcagaggctacatctaggcatataggaacatctccaagaaggaggctacatctatatcctaggaacatctcattgcaggtctccatcactacccaacagaggctacatctagttatgtaggaacatctccaaacaggaggctacatctacatactaggaacatctcttgcaggtattcatcactacccagcagaggctacatctagctatgtaggaacatctccaagcaagaggctacatctacatactaggaacatctcttaccaggatttcatcaatctatatgaggctacatctgtatatataggaacatctccaagaaggaggctacatctatataacaggaacatctcatattctattcccacacaattgcctgaggaggctacatctgtatacataggaacatctcccgtgggaggctacatctatgtaataggaacatctcacatcaggtcttactaaatctcaagtcatctatcctactaccataggatttcatacatttccagcatccacaatcacatacataatcaatcacacctttcataggcggtacagatcatcatcatgcaatccaacagtccatcatacatatcataaggcaacaactcataaccatgagcataagtctcacatcataaaggtcagcttgaatctcaagcatttcagatcaatacatatcatgttccccatcacagggcccaaatcacattatcagcacctcaaagccatacatacccattcaatagtcaatcacacaatatacaatccacatatatatgcaatcattcccaatggaaccattactccatcaagagcatggtggaacacagcaagggacatacatacaaggactaagagcttatctgctctaggcaaagcactagcttccccggtatcgtggctaccaccacccgagatatcggactcacgtcctacataggcaaacacaacgtatgagcaatggtcctaagccgttataacgaaaggaactacaatccctttccacataacatataaccaatcacttcacaagtgattcacggaccctcactaggatccctctcggcctaaccaaggccccagagcctctccttagactctgctcaggctaacacaatcatatccatgccttagccctaccatgtccaagctcaatcatacaatccaacatcagctcatggacaacatctaaaccatcccaagagtatttatcatctactctaaggttcatcataatcatgcactcagcccctttctctatacttgcataactcagagccaaaatcaaacttcatcaataatgatttctaaaggctctatcatcatcacaacaaccccctgaacataagtctctacaagacctttggctaattccaaccccatcacaaaagggtcactattcatgcaaacccccaatctcaaaatcaactggagagacttgagtttcttacctcaacggcgtcaaggaagaccctaggaccacttcctcgagcttcggtgtccttcccccatgatgggtctcagccacactcaagttctctgagctttcctttggggatttcaaaatctcacacaaaaggggtttttgatggaaaagggtgagtgattcaagcttccaaagtgtttctctcacaatcaagagccaaagggaagtgttttgatcaagaaatatggctcaaggaagcttgggagggtcatcaatggagtctagggcgaaatgaagaagaagaagaccttttccccttcaattttcgcgttttgggctttaaatagtcactcagcccgacctgcggcgcccttggcgccggcccggcgctcccagcgccgtgctccagaaactctggcgccatcagcgccgcatctggcgctctcagtgtcacgttctagaacctctggcgcgatccgcgccgcacctgacgccacccgcgccaactggaaacttggcgcccctgacgccacacttggagcccatggcgtgaacctccagtgaccccgcgctcccagcgcgaaactggcgcccctggcgccagcctccagtaaccctggcgccacgtctggcactctccgcgccacctggaaacttggcgccccagacgccacctctgacgctcccagcgccacatcccagagaccatggcaccctcaacgtggacctggcgctcttggcgccacactccagtgctctggcgccctcagcgccagacctggcgccatcggcgccgcacccctgatagggttttctgctaaaaaactcccttaggctcactaatgcatgattatataccttaatcacagacctaaatacatgcttaaaactcagggtattacacaccctaataaaatatcataatggttcatctcataaatataattgtttttttacggtcgattcgcaacacctgatgtcaactctcctcatttgtcttggcttgggacaggccatgcatggaagcacacatgggtggagttaactttctgcactaatatcatgataaaaaaaatagtaaaagagagaaggagagagagcttcattgaatggaaatccattaaactattggtcaataaaaagtaacaataccaaacacctttagatttctattaaaatcatagaagatagtatttctcaaattaaagtggtggagggtggcaaaataatacctacatatgttgttgtgacaaaatatacccgtaatcttgggtttgaagagtaagtatggttttgtaatgagggtggtgtccatagaaatccttatatgccatccatatgcagctattagacatacttccaattgagtagttcaaatcaagaattacccctattggtattggtatggcctctgttgccctaaaggtcttccccataggcatagaaggagaaaaaacagacatagaagggaataatgaagacttagacctccatgcaggtttggcattgtcaattacgcaaaatagaaatttctattgaccgacatacatagtcttttattgaatatattggttaacccacgcagattcttatatatcatatcaaatggcatcaccatgtaacttatagaatgacatcataggttgtctctttatataataatactactaattttattaagtcatctgttatatcatgagatcataaccaacatcgtgcgagtagaatattcacctagtgtggatcaaggttcccgatgaatattaatccatgttgtcgatggggattacttcgtacaaataccacagtaacaaaacatcatttgatcgtatatattaaattttacataatttcaatgtttactctttattaaataatattaatatataatctaaccaatgattaacattttatttaggtgatgtactatctgctaaaataaagtgatgtggtgaaatattatataaaaaattgtaaatttatctattttattagaattctatatgtagtagttagatttataaaattaataggctaaagtagaatttgtctttcatgtgagtttttggtttcaatttaactcctttagttttaaaaagttccatattttgattcaattagacaaaattgatccttttattagtggttttttttttcattaatagtgttagttttggatgatgtgacaaacatccattggacgtgacgtttctcaaagtttgtcatgtacaaccaaattgactaaattagtatggtaaattgatggagggaccaacttataataaaaacattctaaactagtaaaatgaaaatttttagatttaataaataaatttgaaaccaaatattcagttgaggaaccaaaattctattttaaccatattagtattgtataaaaatttattataagtgtcattttataaagtttaacatcacatgtcaatttctacctttgtccctaaatataaaaatcttttaactaattcacatttattaagaaaattggttcatttagttaataacataaaatttgttaataatttgtatttttttaaaactatcctcaaaattattaatatctcattttttctcttaattattttccacctaattaattatgtgtgttagtcatcttctccactccttataagagagaatgaatttatcttattaatttatagtatttatcataaaaaattaaatatattatggtgaacaaataattaatgcaacaaacaacttgaatagagtcttattataagaaggaaacaaataaattacttcatgtgtcccaaaataagtgtcaacctaggtacgttgttttacactgaccaaaaaaaccaataaacaaatgaaagaaaatagtaattttacaaaactaatcatattattaatattacttttaaaaattaaagtgacacctattaggagtattagtgggaaaattaatattatattaaaaatttaacatgacacttattttgagataaaaaaatttcaaagcacaacacttttattttgggatgaaagaaataaaacaaaaatcttacatattggacaaaggtagtataagatatccactaacaactttagaagaaaatggactaattattttttcatccctaaactttgtgtaaattttacctttagcctaaataaaatattgacccatcttagtttctatatttttacttcgttatcaagtatcattgtttagtccctaaacaaaatagtgaccaaattttgttaacaattttggtcccaattatcaagtattattgttaaatgaccgatgaatggcaatcacacgtgagtagccacatcatcaactggaatgatgtggcaaccacatgtaaatttttagtcccttattttttacaaaatttacctttagtttctcgacaattttttttagcagacatagtcacttattcttttacaaaattcacttctagtcccttaacattttttagtcgatcttagtccatcaacaattgttcctaattgtttttagtctctcccatcaaatatcactatatatattaagcgatgtaggcaaccacatgacttgccatatgaactagtagtttaacatgacaattacatttcaagacactttgtagaagttctaagacattgtaaatatttttatggtgtaaaatgcaccaaaaaggtttgaaaatgtggaaaaaaaaacaatgggatgtagtaaggaaaatcaacaactctcaacacatatatcaataacccactaaaccatgatcgttaacacataatcaaaaaaccagaataagctaaatcaacaagatcaataagcaaaatcacaaatcattgaacccatgaatcaaaaacctaatcaacaaaattagagaacccttaatcttcaaacccttccaaactataatcccaaccccacttctaaaacaaacactaaaccttttccatttcaatctcacttacacaaaggcttttcctccacaagtaataacattcatagagggcaaacacgaggtggtgatggtgtcaagagattgagacaacgatgtcaagttttgatttgtgtagtgtgttgttgactttgcttacttcatcttttttttttctttcaaaatttcagaccccttttttctagtgattttacaatgttaaaaaatttgtagtgccttagaaatgcttaaagctatcttgaaccaataatattttaacacgtgagtgcttcgtgaaactaataattcacatggcaagtcatgtgattgtcattgtaacatcattgcttaatgatgatatttgatgggaggaaggaaaaaaatgacaaataaagttgagggcctagaagtgatttttgtgaaaacatgagaaacaaagaccaataaaaaaatgttgatggattaaaagtgaatttcatgaaataggtgagaaattaaaaaatagtttactaaagtgaatatcatgtcagactagttaatgatgtaacaactcatatgactgtcaacatgactatcacgtaatgctaatacttggtggctaggacaaaaaacattaatggagtaaaaatataaggactaagattgatcaaattttatttagagactaaaagtaaaatttgcaggaaaaaagttatggacaacaaacataattaacggataaaaaaataacaaattcaagtgttgaattatgtgatatcatattctgatgggcatatatactaaattacaattcatatttgtttatgtttgaagaaaaaaaataccaacataaaaaaattacaatacttgtgtattatgttgaactagatctctttggttttgttttgaaaattattttacacattgaaacaaagtttattaataaaaatcaaacactgattttnnnnnnnnnnataagccatagatgaaaaatactcatcttatatatgtttatggtcaacaacaaaaattaattattattttaatgatggatactttatcacaacatcatggtaaggaaaaaaaaaactacaaacataatgtaacgcggatcacttagaataaactagtgggaggtataattgcattccaaatgacttgcaatctatatctttttattaataaaagtaaaaaagtctaggaggaaatccttatatatttgagtaagaaatttttggctaatttatttttagataattttctataattataaattaataatcattatcaaataattatgataactatttgaaactttgaataattacatcaattattatctatctgatttgaaatactgaacaattaaactcatgatatctaataattataaattaattattatcaacatctttatctatatattaataaaaataataaagtcttggaggaaactcttatatatttgagtgggaaatttttagaaatttttttatctgtttttaattcatataaacataaaaattcagatgattatgacaagtatataaattcttaatttaaaattttgaatatttagattaattattaacaacacatacaaatttatgtttattatattagattatattattatattctggcccaatgggcccgtaaaattcattaggataagcaatattattaaggggtgagctacatacaccattaatttttcttatataccattcatgaacagtgcgtttccaaaattacccttcgcttttttatcgcttttatataaggatccgtattattcatacttaaggataaaaaacattaaaaaaaattgtttaggaattaaaagtgaaatttacaaaaaagtgtagaaataaaaaacatatttaaaaaatatatgttaaattttaaatataacactaaatttttcaatgtatatttaatacacatatatttttaacataataaattattttaaattaaataaatttagtgatatatatatatatatatatatatatcaacatcgattaatttttaacataattggtctattagctcagttggttagagcattgtattaataactnnnnnnnnnnttgtttaggaattaaaagtgaaatttacaaaaaagtgtagaaataaaaaacatatttaaaaaatatatgttaaattttaaatataacactaaatttttcaatgtatatttaatacacatatatttttaacataataaattattttaaattaaataaatttagtgatatatatatatatatatatatatcaacatcgattaatttttaacataattggtctattagctcagttggttagagcattgtattaataacttaaaggtcacaagttagatatctacacacactattattttcgaaaatatattttaacttttcaaaaaaaaaaaaaacaaacagattgggcttatggattgcccaatccgtatataaaaaaaacaaacggattgggcttacggattgcccaatccgtacatgcaaaaaaaaaattcttacagattcgctgatccgtaagattattacggattcgtcaatccgtaagtatgaataatacggatccgtgtataaaagcgataaaaaagcgaaggataattttggaaatgcactgttcatgaatggtgtataagaaaaattaatggtgtatgtagctcacccctattattaaatgagacagaacaacaaacaataaaacatctaaaccataagcttatccatatcatacaagtacatgccgattccatgcattggttacaatatgttagattccatcaaatatacaaatgaaactcaatcatacatgctcctaagtcctaattatatcttccaaatcgtccatactaataatccacacctctgccccatctagtcacaattttttcaattgatatgtgtcatttgatggtgtgttaattttttttttatcatgatatttttctgatgatttttatggattggaggctgactcatgcctactagagaataaaaagtatatgtgattgttagggaacagggataagttgattaaaattgcatgaggtggacttaatttttcaagcgcattcgaaatcaagttctatgtaaagtaagcatctatgtttataattaattttgactgataaatatgactgaatgggtgattaaattaattttagttatctcttaaaaaaatattttaattatagcattcatattaaaacatattaatatgataacagtaaatatatttttcaaattgtcagacacgtagatatgtgacatggataaaggcaaattttgtctgtacgactgtacataagaaatcatatgttttaaaagttatgcttcttctaccatattgaatatttaaattcgtaatctattatatatatatatatatatgataaatttattaatttttaaataatttaaaatgataatttattattaaataatataattatacattgacattaaactaaaaatgatatcatattttctttttccaaaatgtcaagtaatttagtttaaaaccaaagaaaaagaaaaaagaaaactcagtagaaagaaaaggagggagaattcagcttttttttttccttctgctgactgaatattttaatatttttacaaattcatctgaattctttctctgaaaattctcgagtctctcactcacctggatctcaattaccgagccgtaaagtttcagaaaaagacaaatcaatcattttttttccttttgtcgtaaaacacataaataataagcttttgcattagcaagcttcgttgtaatagcgaccattaccaacgcaccaatcttaatccttgtttttctcatttgtcccaaacaaaattaatttttgtggaacactttttcgacacccccgaattcccacctgcagattctcccgatcaattttcaggtttcactttcttctctcgcctgaaaatctcgaattagggttctgattttaactaattttccgttttgatggtacttttcaatttgggtaatccgatgaatgatgattcatgatttggttagtctttaaattttgcctnnnnnnnnnnnnnnnnnnnnnnnnnnnnnnnnnnnnnnnttttttttttttttttttttttttttgattgtatggcttatagtatatagtattagtagttgtagtttatatatcagatgagtgagcttattttatgtttgctgaattctgaatgttagattattgattgttgtagcatagtgattgtggaagctcaacagagggattggtactgtagataggactaggagtccctgaaatgtatatgcctgtggctacctctgccacgctgcgcggcggattgcctactgacagtggggactctgttgtggcattagaccaagttccgcgatggaatgatgctgatcaggccctggggtttgaaacttcattttcgagttcacacttccctgatcctttagcatcgccctcaagggtagacagtggcgatggcagtgagtcggtgtcaaagtttcctgttgacgatgaagtcaattcgaagatatatttgtggcgggggaatccctggaatcttgaggtggatgcggtggtaaattcaacaaatgaggtcagcactatctggctttttgcttagtattgtttgttgtgttgttttctatcttgtcactatgatctgtggaacctcatgatagaactcatgctcatttcattataccttgttttttgtttaggctatgtcacttttggtcctttatgttttagtgttttttcatttagtcctttaagttttaaaagtctcattttggtcctttcgtcaatttaccattaataccgttagggatttaaatttgaaatgattaatttaatatagtgtaacaattagctttttggaggctaaaagatttcaaatggttctctgattctctaaaaatttgaaatttaatatagtattattgtgttgtttaaggtttccttgatttatgtaacttctgtaggttgtttctgttgtgttgtttacttgttttctatcttgtcactatgatttgtgaacctcatgatagaactcatgctcatttgcttataatcgtgaagacaactgaatataagaattttatgataaaattataaatttaccctactggctgaaagttactgcccaaacattcatgttattgaccattattatatagtgtgatgactgatgagtgattcagtccacttagatagatttatattcttccccctatgtgttcctttcttcattctttgatgagataatgaccattaaggactcctagggaacaggttagacctaaaatgacatcaaaacaggttatattgttatataaagtgattgttttgtccataaaacaaagcagtcgatatagtttccagcctctccctgctcttcaagttaaaattagatttttgtaggcacccttccttttgaggaaatgcatgtatgtttcatttttttttgagtctatagtttgtttattcttctgaagtttggaagtgtctaggggagcaaggtataacttggctttcaaaaattttgatgagataatgagatcatataaaatgctagatagacagggggcactttaattcctatttctgagaacaagggagatttgcaaaagtttgctaactatagagggattaggctcatgaaccatgaaactatgggaaaaagtaattaaaaaaagatcaagacaagggacttacattttagagaaccaatttggttttgtaccaggtaggtcaagggctcaatgctgcatataggcatagaaacgatattctgtttcatgaacacagattcgttcacagtaaattgatggatgacgcactcttcatttgttggtcatggttgaagaacttggacaaagactttgatatatcttatcatttctggactagtaacttgagggaggcttttgtatttaggggtggggttactagatactagacagattttttgctttttggtacagacatccgcactgtcctttggcctcataattcagttgtttcgtgtattatgttgccacgggatagctctggattatacacacccttgtaatagtacctcttgtactatctttttacctatatatatatattactatttttgctgatcaaaaaaaaaaaatgaagattgatggagaagttttggaggaagcaaaaagaactgcatgtttttcattgaattgcaagaggatgactagatgcccaaagaagttttctataaggctctaaagaagaaaggattttgtatcacttatattgggccaacaaatatatgtatgatggtgttataattagtgttagaaccaaggttttaatttgtggttgtcgttgcattacttttttgcaattacgaatattgcggatgttgtgatgtagcttgcagttgttgtggtgtgaattgttcacaacacaaattatattaaaattatctgtcattatataacctataaaaacatgtaacttttatattttttcttctgtcatttacatcacaaaaaatttccccctttcatattttaacttttcaaatttaaattatttaaccttttcctcttaatttttctcctgtctcctccaatattccttcacccaaaaattacctacagcacatcaccaaaattttcctactcaaaattgaaccaatgtttccagtcacacactccagcctcttctcactctttgccttatctctttaatcgatctttctccttctctgtgaccttgtgacggtgctgctgcaatagcactgcaagccgacaaccacttgagacgggcaagtcaccagaagcacatacaggggaaaggaaatttgtgatcaaggctggccgaaagctgcagttatctgtgaagcaagtgccagagtcagatctgttgtgagatgaatgctgttacgtcaggttcttcgtggccacaacactgttcggttgcattcgaggcacatgatttccactccattgtagcagtctgttgtggtattgtttgcttccaatactgttttgattctgttttgttgtggccacatcaactgttgcagaccatttttttaaaccctggttagaacacatgatgggatcactaggggtttccttataacagtaagattaccaagggtctagtttgaacccttatcttttttccttgcctttcttgcacaatgcattccttttggaaatgctatagtcctagagtcgagaaaatataaatgataaagtaaatttttggagaaaagcttttggatgcacatggtttttgattaagctaagtaaagagtgtatttggaatgtcagttcagctagtgaacactaacactagcttaaaagtgaaatttgaagatgatactattccatcagtcctaaggtttaagtatcttagatctatcatacaagatggtggataaaagagatgcacccatacaagctgggtggatggaatgaagaaacagttcaagtgtcttttgggataataaggtgcctcttaagcttaaagaaattttttaccacacaactataacatcaacatcaacatcaacagcacctttaacccaaattaattggggtcggtggtagannnnnnnnnnnnnnnnnnnnnnnnnnnnnnnnnnnnnnnnnnnnnnnnnnnnnnnnnnnnnnnnnnnnnnnnnnnnnnnnnnnnnnnnnnnnnnnnnnnnnnnnnnnnnnnnnnnnnnnnnnnnnnnnnnnnnnnnnnnnnnnnnnnnnnnnnnnnnnnnnnnnnnnnnnnnnnnnnnnnnnnnnnnnnnnnnnnnnnnnnnnnnnnnnnnnnnnnnnnnnnnnnnnnnnnnnnnnnnnnnnnnnnnnnnnnnnnnnnnnnnnnnnnnnnnnnnnnnnnnnnnnnnnnnnnnnnnnnnnnnnnnnnnnnnnnnnnnnnnnnnnnnnnnnnnnnnnnnnnnnnnnnnnnnnnnnnnnnnnnnnnnnnnnnnnnnnnnnnnnnnnnnnnnnnnnnnnnnnnnnnnnnnnnnnnnnnnnnnnnnnnnnnnnnnnnnnnnnnnnnnnnnnnnnnnnnnnnnnnnnnnnnnnnnnnnnnnnnnnnnnnnnnnnnnnnnnnnnnnnnnnnnnnnnnnnnnnnnnnnnnnnnnnnnnnnnnnnnnnnnnnnnnnnnnnnnnnnnnnnnnnnnnnnnnnnnnnnnnnnnnnnnnnnnnnnnnnnnnnnnnnnnnnnnnnnnnnnnnnnnnnnnnnnnnnnnnnnnnnnnnnnnnnnnnnnnnnnnnnnnnnnnnnnnnnnnnnnnnnnnnnnnnnnnnnnnnnnnnnnnnnnnnnnnnnnnnnnnnnnnnnnnnnnnnnnnnnnnnnnnnnnnnnnnnnnnnnnnnnnnnnnnnnnnnnnnnnnnnnnnnnnnnnnnnnnnnnnnnnnnnnnnnnnnnnnnnnnnnnnnnnnnnnnnnnnnnnnnnnnnnnnnnnnnnnnnnnnnnnnnnnnnnnnnnnnnnnnnnnnnnnnnnnnnnnnnnnnnnnnnnnnnnnnnnnnnnnnnnnnnnnnnnnnnnnnnnnnnnnnnnnnnnnnnnnnnnnnnnnnnnnnnnnnnnnnnnnnnnnnnnnnnnnnnnnnnnnnnnnnnnnnnnnnnnnnnnnnnnnnnnnnnnnnnnnnnnnnnnnnnnnnnnnnnnnnnnnnnnnnnnnnnnnnnnnnnnnnnnnnnnnnnnnnnnnnnnnnnnnnnnnnnnnnnnnnnnnnnnnnnnnnnnnnnnnnnnnnnnnnnnnnnnnnnnnnnnnnnnnnnnnnnnnnnnnnnnnnnnnnnnnnnnnnnnnnnnnnnnnnnnnnnnnnnnnnnnnnnnnnnnnnnnnnnnnnnnnnnnnnnnnnnnnnnnnnnnnnnnnnnnnnnnnnnnnnnnnnnnnnnnnnnnnnnnnnnnnnnnnnnnnnnnnnnnnnnnnnnnnnnnnnnnnnnnnnnnnnnnnnnnnnnnnnnnnnnnnnnnnnnnnnnnnnnnnnnnnnnnnnnnnnnnnnnnnnnnnnnnnnnnnnnnnnnnnnnnnnnnnnnnnnnnnnnnnnnnnnnnnnnnnnnnnnnnnnnnnnnnnnnnnnnnnnnnnnnnnnnnnnnnnnnnnnnnnnnnnnnnnnnnnnnnnnnnnnnnnnnnnnnnnnnnnnnnnnnnnttaggacatttatgcaaagatctaaagcattcattcttctgtttaatagccttttgcacctctccattccaccaccatgtttcctttgtaaaaactctgtttcctttgctttcacctaacaccctccttcccacattatgaacacatacagccaccaccatgttgatgttgatgttgaactataacatctgtgatgttgtataatatggtatggaatagagtcaacaagagcataagctaattgttgcatagatgaagatgacaagatgttatagtgagattggacacagagaatataagattaggtttgaatcattagagagaaagtaaggcagcactattggtgaaaagatggtagaatctcgcctaggtggtttgacaatctgagaaaaaatagtctaggtggaaccatgaggtcttacatcgaaatggacatgtcgaggatttaattcatgatagaacactggcatcatttggtctatgtagctgatcctatctagtgggaaaagactttgatggttgctgttgcataatttcttagaggcactcaggcacttactctctgttttgtgtgatttaaaagtctgtgttgaaatgctaatatatttttcagcatttaaaattaatgacattgtaggttagagaagattatactgctgataaaatcaaattgaacactcgtgatattgtttgcatagatgtattcaaatattaagaatcaaaagcatgataattttgataaatgtccaatttttttcttttctcagccacttgttatcctgtggctgcttgcaactaggaatcaaattatattcttccattattgacacttgttagtgtattcaaagctgaaaatgtatatagtagaaggattaggaataagcccaaataagatgggcccagccctgttagtgtattcaaagctgatgtgtaaagttggagttagaaacagtagaagagttataaaaaggaaagattagaagggaaatagttagttttggagttgtaactgatttgagggagagaccaggctcaaaggtcctggatagtttgtacgttcatttctttctttgggaacctttgattctgaggagcaatacacatcctttcagatttctttctgccattctttcgtcttttagttattctttaccagttccttacagaggccttttcatattcttgtttgaatattttatcctgcatcttagagagtaactacataatatatgagatattaattctggatcctcctaatcaatcttcctaatgatcctcctaattactaaataaaaaaagtattgattggattttgtgttctcaaggcatgaaatgcatctactttctatttaatgttttctttagtaggtatcagaaatgtaatggttattagtaggatatatcattattcataatataatggtactgttaagcatattagaaatgaaatggggctaatgttatcttatttcttacctggttttcatttcttgtcatgaacagaatatggatgaagcacacagcagcccagggttgcatgatgcagctggacctggtcttgcagaagaatgtgcgacgctggtatagttaattatttaccaaaaatctattatgcactccatgttgaagttgaatgttatgcgagcttagcacatgaattacatatttattaattactatgtttttagttattttatattttgtggtttaatatttcttaaacttgtaagaagcagcttcagaaaaattgtcatatctcagtaacatattggaagcagtttctgtaaatgatgcttgggaatatcgattaatacatctgtattgttgacagggtggatgtcgaactgggatggctaaagttaccaagccatatgaccttcctgccaggtttgtatagtcaccccccccccccccccccccnggatttgtataataattttaaatgttgaataccatgttttttctcccgaggtttggatcttagttctgttttttcttttccctttttggtgaaatctgagatctgttaatcatatgtcgcactccagaaattatgttgatgcattgattgcattgtatttctatactcctttgtaacttgccaatctattgtctacattttgtattctttgtataccatttttattctttgataaattacctgcaggaaaattatccacactgttggcccaaagtatgctgtaaagtaccataatgctgcagagaatgctttaagtcattgctatcgttcttgcttggagcttctgattgaaaatgggcttcaaaggttccccgccccctcccaaatgttttattgtttttttccttacattttattgttttcatgaatgccatgcttaaaattctatgacttacttttttttggcttgtatttatgtagcattgctatgggctgtatttatacggaggcaaagaactatccccgagaaccagctgcacatgtagctataagtgagattttatgtttacgtgattttactttttcaatttgtttcttttgatgttgtaacctaatacatgatttattaggcaacatcatgggaagttgagaacataattacctacttttgggtattattattacttgttcattgttgtttcatccctacttaaaataaaagtactgttaggaatcttgtaattatgtaatttatattgtgtgaatagaattattttgtaaatagtcatattatgagctgtataagtatgaccataagtatgaccattatgcattgtatttatgactctaataagagcctctgctatgtagtcaagacacacggattcattcacatgtcctcttgttttcctccctctcaacagggtaatagagtttaacgagaggcaaccctaatttgtgatttctcagtgggtccataatccactagtgcaaaattcttcctgaaaccatgcctgcctctggttttcagccatctttccagcaagtattcccactttttgccatcactgctgaccatgcagagctgcagacgctgccatctgccaccttttctgcctgcggaatacacctccagaatttgtattactaagatcaattgatccccggcaaacccacctcgattggtggtctgataggagtagaggtggggaaaagtgtacaataggaaggtgtaattagtaaataacagttagtgcaacagttagtgctgttagttagttagttgttgttagaggaagtttataaataagggttagtagctgataggaggggaacaattcaggaaaggaataggagggtggtggacctcaaattcactttgtatcagctggagtattctccagaaatcaataaagttctgtgttctcttatctgctgacattgtagctgttgtaagtgctatctttttcaataaagattctctctttcatctatctttctggtctagtatctatcatgttctcatgcattttcatgtgcatcaccgtcatctgccggcacttcctgccatgtgtggtggcatgtccaattgcccattctcgccgctgaatatagcgactggattctctctccccttccagattttgtctcagaatgtgggtttaggcctaactcaaccccaaaaattagctcatagggtgatggttgtcccccacttatatactctatcttgacactatctctagccgacgtggaacttgggttttttcaatattctgcagtcaattgtttggtttggccctcggtttggttggttacccttgatttgcgttctttagcccttgttttgggtgtatttttgctacccactctctcccatggttggatctacctctagtagcttttcaggctatgctagctatttttaccatgtcattgctctgttgtctactgacaagttagatggctaaagggataggattactttgatcacttcaccactgagattgatattgttgctgaggttgattactccaagtgaaataagatcattgctcaatgttgtagcaccatcaaatccaccattcacacctcttcaatacagatcttgtgttcacaagacatgtgaagctgttgggagcaagtgaaaatcctttatgccaataaatataatgtctacataaggtttgccaaaacctcacgagtattatttcccctagatggtttgatggcactatggcagaatatttgggcaaagtccatgggggccctacattacttaaatgtgctcatgccacccgctgataccctaccaagaagtgtgaacatcacaggatttttttgaagttgttggctttatatgagctacttgtagaatattcatttgtatgtgatcaaattatgggttctcctaatgtgcccagtgcccactctcaactttgctcgatctaccttcttgtgtgttccagccaagttactaattgatgtgggtgtgcctcctgcccctattgattattctgcctttgtctctgataggagtgaaggtggggacaagtgtataataggagggccaattagtaaataaaagttagttcagttagttataactgattgttagtcagttataactaactgtggggggtagaattagatataaatagcagttgggtggctggagaaaagcaccagaaatgtattaggaggttgtgatcctcaaaatcatattgttgctgctgtagttgctttctttttcattaaagctctctttcatctagttttctggttcagttctatcagtctctcatagtggtgatcatagtcattcccacaaaccaagcaaataacgtccctagtgcaatcacttccacaaggttggccatacaattgaccggtggtatgctttatgtggccgccctcgttagatggtctaatcatcaagcaccactggtccactagctattcttattgacttcatgatgtgtgagaattgttaaaggtcttgttccactgcctctatgtccacactggtaattgtaattcctttgacagtatctcccattctacatgtctctattgatcacataactggtgatatggcattaaacaggttaggcaagctctgttattgactggatatctacttctagcttttgcatttttattggtgattatttgatttcctggagaagctagaagcagtgtagtgttgtactatcaaatgcataagcaaaatgttgagtcatgacttcagccacttttgttcttatccatctcaagcaattgcttaaagaactgaaatttggggaggttatacatattacactcatttgtgatattcattaaccttgcatattgcctcaaatctagtgtttcattagaggacctaacacattgagatagatagccatctaatttgggaaagattttatacagagatatcactacctttttgtcaatttgaatgaccaactagtggatgttcttactgattcattgagaggtctttgaattggttatataagtaaaaaggtgctgtgttggaatcttgtaattatgtaatatattgtgtacatagggaaatattgtaattagtggtattatgagctgtataattttgtgaacattgtccaatgtattcatgactctaattataaataagagcctccgatgtgtagttaagacatgcgggttcattcacatagcctctcatttttcttcctctcaacagccactaatgccaaagaccaggaatatgagttgctaacttgatattaagggaaactaaaatttgggaaggggaaggggaggtgggagatagaatgttagggaacccccattagtagttagttatattattctaagaaatacaagttagttatattattctaagaaatacaaggggttatgttaatctgcaactgattgtgcccattgagggtgagtttatgttagcagttcagttgttgcctataaataggaaaaggagttgagaagggagtcaattggggtgaatgaaatagaattgggactagggatatgcctggatctctcgaatacctactgaactcattgtaaagatactcaaaattaataaggaattctgttttcctttcatttctgatctagtttctaacatagaatgacaaagtatgctctctctctccaagttgtctatcaattccttgctgtttgcagaatttgatattatattttatcatttcattgatttttagatcaggggtaacaatggcagcttgagtaggagaacagagtgcatgcggggtgcatctttttatctttttgatgaatcataattataccgttatgtataatttccaatgatctcaacttattttatcatgtccctgctgaatgcatctagtatataaattataaagtatgatttgtgtcaagttagcaagtgtttataaattcctgaagggtggtatattaatcttaggataaaccatcttttattcaggaacagtgcggcgatttcttgagaagcagaaagacaacataatagctgttgtcttttgcactgtgagcacaactgatactgagatatataaaaggtattttaagcatttgtttgttttgatgatgatatctgcaaatgttttgagtaacttgaacttccaatagttacacaagttaggttgattttcttttcggccaacctttagactttgtattaattatttattattttttaccttttgtattattcatgaaggttgcttcctctgtactttcctcgggataaacatgaggagcaggttgctttgtctaaacttcctgcagatgttggggatgaaaatggggagacaaccttagatgagcgtaaaatcagaataaagcctttgcccaaaaggagagtttcaacaccacctgaatttgcagttgatcttcctgttagtgatgttggcttggttagcaggtcagtagttgatgcaaaccaaattcacagaatgacaaataacaggtaaaatggatcaattatggaaagcaaccaacgattgatttattggagcagataatataactaatattttgttacaactattcaagccttctgtgtttcaccttatttgagatatctgtctgaatattgtgaaaccaaaacagataatacaggcatgtgcacagataatataactctcatttgattgccataacggtattttcttgagagtttttgttgtatttgattaaacagaacacattccattttttttaatctaacttctggtagaagtttcctgatccatgtggctattataggaattcatcacatttagattcattcctggatcctgccttcatgtcaatgatcaaagaccccgatcaaaggcggatggagcagtgggagaaaacttccgaagcacaaagaggctggaattgtgctaaattgattggatatggcgaccttggtggacccacattgtctgctgctgaagaatattctctacactctagatacctgtctaaagcaaattccttaaatctttctgaaattgcagaaatgaaaattgtgtaagtatccatatatttcatcatctgttttgcacgcatgctcagttttagtagtatttgtggggatttatttgtattttttgttaggatgattgaatccttcttactaacaatgttttgctggagatgaatttaacttttaaggttgtaaaattccctttatcctttttggcttttttatcaagtaacttaagaatatttttctattccaatagttcacaagtaacctgagtctatacaagggaaaagggaggaaggaaattgggacatgagggtaatctggaaaatagaaagggcaatgaaggaataacaactaatgggataagtaaagatttggttgggggagagcatgatgggtgttataaccgaatggacaggtggcagcctttggttggagagggggattctagcatgattgaagagatggcaaggcaatatagaggagggaagggattcagaagaaggggacaattttggggcaaggacattaggaaggcttctgcctgacaggggctgcatattttagtgtctctttatttgttaatactttccttttgtttctgattctaatgttgtttaattcaaatcagatcaatgagttgtaaattgcaatataaattgagcatcaaatacatttaatatttaacggtcagactgttcgttttgtaatgatagcaagtttttgcggtgaagaaaataaaaataatgttgctggataagatttaattacttagaattgtgagaaatgagaaatatgaaattttctgaattaacttttatttatatacatgaagattacaaagataataaatgtcaaatacaattaacaaggaagcaattatgttagctctatttcctaagatacatttaacttactggacttgctatacgaagaacctaagccatttcgaaagtaaaacattaatgtgcttcagcttacaacaagattcaataataattgaaattatgatgttgttttgtgtttgggaaattccttacattcttgttactcatagcctatcaatcttaatgcttcatgtatgtgttcagactgatctttttaagggtttatatatttttgcaattaatgtccaagatatgtgttttttcagctatcgtggtggggtagacagtgagggtcatcccgtcatggttgttgtgggggcccactttttacttaggtgccttgatctggagcgatttgtgctctatgtggtgaaggtaattttgttataccctgctgctggatatctttttctgttggcaagcattagtttggccattataattttttttagcaatgcatacttctattttgaaagtaaaaactgatttttgttcgtaagttctaatctgtcttttttcccccctttgttttccttggtgttaaatttcaggagtttgagcctttaatacagaagcctttttctattgtctacttccactctgctgcatctttgcagatgtaagtgttaaatgtttgaattctagatttactcattggtctattatttttttcatgaaatataggtttggtatatgttaatcattgaaaaatattttaggaatgttcaaggggaatgagctaattgttaaactttcattgctaactattattttgtgtgaattatgtgattactttgaaatagttctgtatccataagttttggtaattggtaatcctctctttttattcaactaaataaagggaaatctgaaaattcaacagtcaagttatagaaaatatgtttgaacatttttgttttatacatctgcaatagtattttggttaccaaactattcacattatattggcagtgcatagttgctggaaacatctgcttgccattggctttgtcaatgcaaggcatggcatcatgaagccacttgcccacttgtagtttgtgcatttgttgagaatgattctgcgatatttttcttccatgtttatattactaaaacttgatacatgctcaatattaaatttgagctaccctttggtttgattcaatgtgacttaagtatatgctactttgttgaggatgctttagctgttcaaatgcattgtttgctgagggaagatattcctgtttgagtggtaggcttttatgacgcatcacttaagagacaaaggtgaccctttttggataaattgtgttaaaatgaattgaagttgtgccactggagtgaagcatacatgaatgaaagttagtaactttgaaggttggttaagaatattttacataagcaagttgcattatgaattgtgaaagtgtgtttggtttacaattattggttttttctcctgatttttgttcaatatccatgattggctttgttgacagaatttaattttacttttcctgtcctgttttgatataattaggcagccagacctgggttggatgagaagattgcaacaaatactcggccggaagcaccagcgcaacctgcatgtgagcactgtttattttcttctctgtttggtttggtactcttacaaactatttctgttgtcttaatgcattacgctttgaaggttttctgatttttcaatttgacgtgtaggcaatatatgtccttcacccaactatcggactaaaagcagcagtatttggacttcagatgtttgtggacaatgtggtacagtagtagaatttatgcatatttaatgacctcatatgtgtgtttgtatatttgtgttattaaaagttgactttcaggtttggaagaaagtggtatatgttgatcgacttctgcagctcttcagatatgtacctcgtgaacagttgaccatcccagattttgtgtttcagttgagtgtttatgttttcacacgatgccatctatacgttttctttttgtcataatattattctgtacaatgtgccatttttaatatacggcttctgaaaagtatttggattgaagcagttctagcaggctaggaatgccctatgataatagagtatcatcacaggaattctttcgacttctttgggctgcaaattatttttctttctgtatctgtttccttatagtaaatgtagtttagatgataggcttggcattaatttgcttcatacttttattcacacaggcatgacttggaagtgaatggagggacgggtctcattgtggatccaagaacaaaatatgtgtacaacagaccatgacactgcagtttctgaattatatgcttgcccttattgtcgcagttaacaggaagaggggcttgtatgagtttgaaatgcgtatggaaccattttttttcttttggatgtttggaaggagtgataagttcccctgtatgtatatgtaattgattgtggaagctaattggttggatttctttaattgtatattaaataaaattagtcttcaatgattttcatttctatcattgcatcattgattcctcttatttctctttatttttctctttctatcacatcatatcagttattatatctatatttttctattttttctctcactagatgtctactaaatttagtgttaactgttctaccaaacctgtggtttagttgtttggtcattatgaacattttaatgtgattttgtcttttttaaaattgttttaaagcttgcttatggttgtttagtttggaagaatttcagaattttagctttcatgtagaattcccatgaatttcataaaaagggttgttacataatgaattttgatattgttaaggtccaagattggaaactttcttgaatccctaatttagcagtgatattctgaacaatactttcacacaccaaagatactgaataatgcttctttatttattactgaagaatgaaaatacaatcacaagatattactctcttcacaagggactttttccttctctaacatatattcctctctacccccacataacagagcacaggttatatannnnnnnnnnnnnnnnnnnnnnnnnnnnnnnnnnnnnnnnnnnnnnnnnnnnnnnnnnnnnnnnnnnnnnnnnnnnnnnnnnnnnnnnnnnnnnnnnnnnnnnnnnnnnnnnnnnnnnnnnnnnnnnnnnnnnnnnnnnnnnnnnnnnnnnnnnnnnnnnnnnnnnnnnnnnnnnnnnnnnnnnnnnnnnnnnnnnnnnnnnnnnnnnnnnnnnnnnnnnnnnnnnnnnnnnnnnnnnnnnnnnnnnnnnnnnnnnnnnnnnnnnnnnnnnnnnnnnnnnnnnnnnnnnnnnnnnnnnnnnnnnnnnnnnnnnnnnnnnnnnnnnnnnnnnnnnnnnnnnnnnnnnnnnnnnnnnnnnnnnnnnnnnnnnnnnnnnnnnnnnnnnnnnnnnnnnnnnnnnnnnnnnnnnnncttttaactaactaacctcccttcttatttctacaagagtatactctccatattaccggcttctcactccatattaccggcttctcactcttttttattcgtaacagatatgaactaattctttgaacaattcccatgaatccgctaattagaatgatcatttgttattctaagtgattatgacttagtttgtagtctataggtgatcatgtgttctaagatagaaacagtctagcagatgttgaggaaatgacaacctttgaaatttctacgttataaagataacatcaactatccattagacaagaagctcaactacaagaggaggaagtcagcgaatatattgtactatgcaattaatttttcatcacaaatcttgtttttggtctgtacgagtcatttattgatttaagatgcttgtttaacgatagattaatatgctcaacaaaatttgaaacatatcagtatgatggagttttaaaaaaaaaatttagtgcaggtcttaaatacaggactgatttgtttaaatttagttattgaaataaatatttatatcaataaaataaaatttttggtgtatttgtctaaactgtttttgttttacacaattttttgcttattttaaaaaacaaatccatttgctttttaagaaagcacttttataaaaaaaatacttattttaaagttatttttttaagtttaaacaaattcacccacaatcttttttaaaaaatttgcaatttttatcaaaatttttattcaagatagattcaggaaagagcattacttccattgaaaattctccaataattgcataacactggtagatcaagagattgacttgcaatcagaaaggaaagaattgaaaagaaaagttaaagaatagaatttgaaagcggttaaaaccaaaagtgatccaaaactttaagacctgtctaatcctttgatgaaaggcaaatatgtaaggttttgtataagttttaataacaaagtttattacattgtacacactaatatttatgaacaaaaatcctaactattaggaacttctaaatatatcaacaacaaaaaatgaacttctaataattactccagctaacttcctgccgtcaccactggtagataattttttatcttcattttccatgacttctatggtctcatcttccaatcttaattttgatcatactctagtcaaaacagaaacatatttattactttaacgaaataattttgacagaaatagtgcaaataattttggcatcaacagcaacgttagtgaaggagctccaagtcatttaagcacgcaaccaaatacaaagtgtgacgaaaaaatggcgagtcaaattccaagtgtgagactgtagaaactagaatatatctcaacagttgtggaacaagagaatcggctatgccattgaatcagaggaatccccattcctgcgaaaaaactcttcattatcctcaccatctttttctcttaaattgtcaaactttctctgcagtgcagatcatccacaatccaagttatgcagtctactgcagagtgctgattacatcatccactagattgcagtagcaagaaaatgacaatataatatttgcccctgctgcatttctcatcatcctgtgcctgtgtgagtgtatctagtggggttaatggtgataataatagcctttctagtttctatataatatttaacttacttcatagatattggttaagtcaaaaacacttcaattcaccagagaaaaaggtgaaaatattaactgatatctccatattagaatccattcacatctgccaagctccttgatttttatactccaatggagacctcatgaaatgttacctgtggaatcacttgtttgagcaaaagtactttttggctttaccaccacataatcatgcacagaagatgtacatgaatgattaagaaacaactgccacttcagcaagagtatcattgttgagatccatctccactgaactacaaccagggaccttgctcaatcccctttgctttatcatctccctcacttgcttaaccatttcccatctcccatctgaagcatacaagttcgacacaatcacatagtaagtgatagtgcaagaatgcacaaacactcactcttgctgtatcagaaactgatactcactcacttgtgattcttggtgcttcacacactcactcactacacatatgcacacacaaagaaatcagagaaaactgcagcagctcatactgctccctcttgcattacgtatatgctctgtttttatctcacattacagagtaattacaacttcatggtgtatttatacacagcttaatgctagctaactaatctaactaactaactgaattacaccaatacacctcctaattcagattagttatagaatgtacacctagtttacatctcagttctacaaacttagcattcttcaatggcttggtaagaatgtcagctagctgctcctctgttctgcagtgctgcatttccaannnnnnnnnnnnnnnnnnnnnnnnnnnnnnnnnnnnnnnnnnnnnnnnnnnnnnnnnnnnnnnnnnnnnnnnnnnnnnnnnnnnnnnnnnnnnnnnnnnnnnnnnnnnnnnnnnnnnnnnnnnnnnnnnnnnnnnnnnnnnnnnnnnnnnnnnnnnnnnnnnnnnnnnnnnnnnnnnnnnnnnnnnnnnnnnnnnnnnnnnnnnnnnnnnnnnnnnnnnnnnnnnnnnnnnnnnnnnnnnnnnnnnnnnnnnnnnnnnnnnnnnnnnnnnnnnnnnnnnnnnnnnnnnnnnnnnnnnnnnnnnnnnnnnnnnnnnnnnnnnnnnnnnnnnnnnnnnnnnnnnnnnnnnnnnnnnnnnnnnnnnnnnnnnnnnnnnnnnnnnnnnnnnnnnnnnnnnnnnnnnnnnnnnnnnnnnnnnnnnnnnnnnnnnnnnnnnnnnnnnnnnnnnnnnnnnnnnnnnnnnnnnnnnnnnnnnnnnnnnnnnnnnnnnnnnnnnnnnnnnnnnnnnnnnnnnnnnnnnnnnnnnnnnnnnnnnnnnnnnnnnnnnnnnnnnnnnnnnnnnnnnnnnnnnnnnnnnnnnnnnnnnnnnnnnnnnnnnnnnnnnnnnnnnnnnnnnnnnnnnnnnnnnnnnnnnnnnnnnnnnnnnnnnnnnnnnnnnnnnnnnnnnnnnnnnnnnnnnnnnnnnnnnnnnnnnnnnnnnnnnnnnnnnnnnnnnnnnnnnnnnnnnnnnnnnnnnnnnnnnnnnnnnnnnnnnnnnnnnnnnnnnnnnnnnnnnnnnnnnnnnnnnnnnnnnnnnnnnnnnnnnnnnnnnnnnnnnnnnnnnnnnnnnnnnnnnnnnnnnnnnnnnnnnnnnnnnnnnnnnnnnnnnnnnnnnnnnnnnnnnnnnnnnnnnnnnnnnnnnnnnnnnnnnnnnnnnnnnnnnnnnnnnnnnnnnnnnnnnnnnnnnnnnnnnnnnnnnnnnnnnnnnnnnnnnnnnnnnnnnnnnnnnnnnnnnnnnnnnnnnnnnnnnnnnnnnnnnnnnnnnnnnnnnnnnnnnnnnnnnnnnnnnnnnnnnnnnnnnnnnnnnnnnnnnnnnnnnnnnnnnnnnnnnnnnnnnnnnnnnnnnnnnnnnnnnnnnnnnnnnnnnnnnnnnnnnnnnnnnnnnnnnnnnnnnnnnnnnnnnnnnnnnnnnnnnnnnnnnnnnnnnnnnnnnnnnnnnnnnnnnnnnnnnnnnnnnnnnnnnnnnnnnnnnnnnnnnnnnnnnnnnnnnnnnnnnnnnnnnnnnnnnnnnnnnnnnnnnnnnnnnnnnnnnnnnnnnnnnnnnnnnnnnnnnnnnnnnnnnnnnnnnnnnnnnnnnnnnnnnnnnnnnnnnnnnnnnnnnnnnnnnnnnnnnnnnnnnnnnnnnnnnnnnnnnnnnnnnnnnnnnnnnnnnnnnnnnnnnnnnnnnnnnnnnnnnnnnnnnnnnnnnnnnnnnnnnnnnnnnnnnnnnnnnnnnnnnnnnnnnnnnnnnnnnnnnnnnnnnnnnnnnnnnnnnnnnnnnnnnnnnnnnnnnnnnnnnnnnnnnnnnnnnnnnnnnnnnnnnnnnnnnnnnnnnnnnnnnnnnnnnnnnnnnnnnnnnnnnnnnnnnnnnnnnnnnnnnnnnnnnnnnnnnnnnnnnnnnnnnnnnnnnnnnnnnnnnnnnnnnnnnnnnnnnnnnnnnnnnnnnnnnnnnnnnnnnnnnnnnnnnnnnnnnnnnnnnnnnnnnnnnnnnnnnnnnnnnnnnnnnnnnnnnnnnnnnnnnnnnnnnnnnnnnnnnnnnnnnnnnnnnnnnnnnnnnnnnnnnnnnnnnnnnnnnnnnnnnnnnnnnnnnnnnnnnnnnnnnnnnnnnnnnnnnnnnnnnnnnnnnnnnnnnnnnnnnnnnnnnnnnnnnnnnnnnnnnnnnnnnnnnnnnnnnnnnnnnnnnnnnnnnnnnnnnnnnnnnnnnnnnnnnnnnnnnnnnnnnnnnnnnnnnnnnnnnnnnnnnnnnnnnnnnnnnnnnnnnnnnnnnnnnnnnnnnnnnnnnnnnnnnnnnnnnnnnnnnnnnnnnnnnnnnnnnnnnnnnnnnnnnnnnnnnnnnnnnnnnnnnnnnnnnnnnnnnnnnnnnnnnnnnnnnnnnnnnnnnnnnnnnnnnnnnnnnnnnnnnnnnnnnnnnnnnnnnnnnnnnnnnnnnnnnnnnnnnnnnnnnnnnnnnnnnnnnnnnnnnnnnnnnnnnnnnnnnnnnnnnnnnnnnnnnnnnnnnnnnnnnnnnnnnnnnnnnnnnnnnnnnnnnnnnnnnnnnnnnnnnnnnnnnnnnnnnnnnnnnnnnnnnnnnnnnnnnnnnnnnnnnnnnnnnnnnnnnnnnnnnnnnnnnnnnnnnnnnnnnnnnnnnnnnnnnnnnnnnnnnnnnnnnnnnnnnnnnnnnnnnnnnnnnnnnnnnnnnnnnnnnnnnnnnnnnnnnnnnnnnnnnnnnnnnnnnnnnnnnnnnnnnnnnnnnnnnnnnnnnnnnnnnnnnnnnnnnnnnnnnnnnnnnnnnnnnnnnnnnnnnnnnnnnnnnnnnnnnnnnnnnnnnnnnnnnnnnnnnnnnnnnnnnnnnnnnnnnnnnnnnnnnnnnnnnnnnnnnnnnnnnnnnnnnnnnnnnnnnnnnnnnnnnnnnnnnnnnnnnnnnnnnnnnnnnnnnnnnnnnnnnnnnnnnnnnnnnnnnnnnnnnnnnnnnnnnnnnnnnnnnnnnnnnnnnnnnnnnnnnnnnnnnnnnnnnnnnnnnnnnnnnnnnnnnnnnnnnnnnnnnnnnnnnnnnnnnnnnnnnnnnnnnnnnnnnnnnnnnnnnnnnnnnnnnnnnnnnnnnnnnnnnnnnnnnnnnnnnnnnnnnnnnnnnnnnnnnnnnnnnnnnnnnnnnnnnnnnnnnnnnnnnnnnnnnnnnnnnnnnnnnnnnnnnnnnnnnnnnnnnnnnnnnnnnnnnnnnnnnnnnnnnnnnnnnnnnnnnnnnnnnnnnnnnnnnnnnnnnnnnnnnnnnnnnnnnnnnnnnnnnnnnnnnnnnnnnnnnnnnnnnnnnnnnnnnnnnnnnnnnnnnnnnnnnnnnnnnnnnnnnnnnnnnnnnnnnnnnnnnnnnnnnnnnnnnnnnnnnnnnnnnnnnnnnnnnnnnnnnnnnnnnnnnnnnnnnnnnnnnnnnnnnnnnnnnnnnnnnnnnnnnnnnnnnnnnnnnnnnnnnnnnnnnnnnnnnnnnnnnnnnnnnnnaagctccttgactccatcaatcacctcttccaatacatcttgaaaccgaaaaagcactctcatctgcgagctccatctgtcataattctttgctgtcaagatcggaagattcataggaacattgctactcgggaatgccatgctttctctcaagaaccaggatctgaaacacagctcttgataccactgatagtgcaagaatgcacaaacactcactcttgctgtatcagaaactgatactcactcacttgtgattcttggtgcttcacacactcactcactacacatatgcacacacaaagaaatcagagaaaactgcagcagctcatactgctccctcttgcattacgtatatgctctgtttttatctcacattacagagtaattacaacttcatggtgtatttatacacagcttaatgctagctaactaatctaactaactaactgaattacaccaatagtaagaagcttcatcagggtgcaactccaacatcttcttaattgccgcctctcccaactcaaacctagaatgaagtccacacccatggagaaaagctccaaacacactaacactaggctgaacaggcattctctcaataaaatccaacgcctcttccaggttcccagcacgtgccaacatatcaaccatatagtgcttcatggaaggaacaaaattcaactccccacacatcaaattaaacaatctcgaaccctctccaaccatccccgaatggctgcatgctgccaatatagtcgtcaagaccacttcattcggctcaacaagctcctccttcaacatatctctaaacagcacaagcgatccatttccatcaccctgtataccatagccgccaatcattgcaccctatgttgccacattcttctcaaccatcgaatcaaacaccttccttgccgcctccgcatccccacatttcgtgtaaaagttcggcagagcagtgccaacatggatgttggacaccaccagcccatccttcaacgccaaactgtgaaccgaacagccaagctgaagcgcgccacatgaagcacatttggagagaaccccaaccacagtaaccgcatctggcaaaacatctccaccatcatcctcctgaaaagctcaagagcctcgtaagctttgccactctgcacacagccagagacaatcgagttccaagacacaaaattcttctcagaaatcgattcaaatgcgtaatgagcacacagccagagataatcgagccacattttgcacacatatcaacttccccataacaaactcgaaacagtaaccgaattcgtagaatccagctccatttctcgtctttaaacaattccaatgccaaatgaggatagcctctctgactacaccttacaatcatagccgtccatgaaacgagatcacgatcttgaaaaacttaaactttcatcaaacaccttacgtgcgtcctcagtgttttcgcatttaacatacatgttcaaacgacgtcgttaggaaagaataaacacaaattccgattttagtaacaaacccatgaacccactttccctggcaaaacgggcttggcccggtgggccgagccgtttaatccacaaaaaaatgcgggttggattgatattttaagcacatattcattaaatggatcgggccaactcgacccacaaaaatgtgagtcaggtcggaccagtccactaggccagcagctcaccaataaaaaaataagatatttaatagctaattaaatgagtgacttagagggagagtgactaagaaggaatgagtgattttgaatccttgatcctaatacatttttatttagaatctaataatgagttatattacatgtacaaatatgttttgattgtctgtattgtaacatcccgggcgctgacgagggcggggagtgatcgccggtgcagtgaggcacggacaaggagcggctcctggcaggcttccagcgggaggggtacatgaatgaatcgaatacacacccgaacgagagggatccagaggttgtgcaggtattggactgtacagttgaggatagcttaaaatgatttaataggtactacctataccaacaaggtgcatctacttttcgatagcccataacataagaactccacatacaaagcacactgaaaagtcttgtgttggtatgtagggacagtcgttgatcctgcaagtggccgggcgttacatgtatcattgtgaagcaaatttctaagtatttgttaatacttaggagctaattgaaaatcattgttagacatatattccctgcttgtttttgcttctattaagcatgtattttatattaaaaattattgttataggattaagttagtacattattaatttttagtataaataattaaatttgaatttttttaataatttttttacctttttttaaaaaaaaatattttttttattttttaagtgggctggcccgttggcccactaacccaccttaaagtgggacgagctagtattttcagcccactttacaaaaatgggtcagcccggtccaacccacttttttattgggttaggccaacccggcccgtttttggatgggctggcccactttgtcatccctaactttccttggtgcaacgaattcaatttcgtgcacgctctaaccatgctgccaacagtgaactcgtttccgtcgataaacacttcacgcattctgttgaatagcgttagcccctcacgcgctcagtcgttctgcacgtacgcgccgatcatggaggtccaccaatcgacggcagaggggatgccgttggtgaggtcgtggatgaggaaggaggcgtggagtttttctagggaggggaggtttatgcaaaggctggagaggtagaatgtgctggggagtgacggttgttgttgttgttgtccatggtggtgaggggaggttttctggtgacaccataaaggagtcttgaaattgggaacatgtaatattatagttcagggtttgaggtttaagcctaaggaagaggatttacattccccttgggaatgacatttacgatccgggtttgcacatgtaattaagaattgtgaataaactttaaccttcatgtatgtggattcgagtctctctttggtgagtaaattgttttccttgtacctaggaactatttgagtaggtataatgggatggaattgtttgtgattggaaagtgcataacaatcttttaggtggacctttgtgcataatctcaacatgttcttcgtattctgtctggtagtattgagagtaaagtgtctttccgtttatgattatatcttattttatattttgcattttatttttaaagttaatattttatatttctattaaagtacctaaatattaattagattttatcaagtcattaagtagtatttgataaataagggcatctttcccttaagaacttgcataatatttgacaaattcatacctttttactatctaaactaacaaatgaaacaataaaaacataaacatagcattcgatatcgagggtgaaatagaaacaaagctacaagttgaaatattttaacatgtttagatggaagcacgataaaatgaaacaaaaatcaaatataggatgttaaggttagatttcatcaaaccaaattctccttaccctaaagcatgatatccaacgtaaaattcaattttgataccgaccattgttcaaaaatgatattctaatccataatcctttaggtgaaaagagcctaagttcagaggaggaaaggacgtagtttcttggagtaaacaaacatggttaacatcagaagagaatagtgagtggtaatgacccataaccatatttttaacttgctcattatcatacacccattggttgtccccattcattaaagcatcaatcctattgtgtctacatctggccatgaaggactgatggaagaaattagtattttgtctccaaagttgagccatttaactcgttccttccttttggttaagagtctcagtaaactcaatccaaaggctttgatgtagttgcatcatactgctattaggagactgaaagatctccctattaatgccttcatttctggtcaaaatcctctttttcttctgaaaaatattaccaaaggtgtccaaattccaacctttaagggtgtgagtaagattttaatattctgcccaaggaaagagacagttgccaagcattttcaacctataagtgaaaatcaaggtggtccaaccaaggtcccaaatatttgaaataattggtacccctcctttgaagaccatcttaaacgttgacctaaagaccacattgatctgaagaaggcaaggccaaatgtgatatgaacatggaaatatgacggattgccttgaagttttcagacttagaaattgacttagttttcttttagagaatgatattgacgttgcactcaagaaataggtgggaaggtgagtgataagtcatagatttgatctccataagttgccttgataagatcagatttagttctttacccaataactaaggaaagttctcacaaaagggagaaaactcaaactttcattcagactaaaatatgcctcaaagctacaaagttcctactatttacaggctaggctttcttctaaacatcccactaggaattaatttccacttataattaattcctaaaaacattaatatccactggtaataaaatcccactaaccattataataacttaggaagcctaaaaacataaaaattggcctaaaagatgtcaatagtcacatggacttattacctaaaaataaatatgaaaattaaaggaaaattagaaaatgagcctttaattagttctttagaaaaaaaagctatgttatccatccaaataaaatccagtccatagttgcatcttgagtataaactcttggattgattgtgctcttcaaattattatctttaagtttgttgaatttgtcttcaagttctacaaatgagacaattcttggtttatgcacttgcatgactaagctttggaaagccttcttagttgttttagtcttgctttggtcattgggtctgtcatccattgcaaaagatatttgaaatcattagacccttgctagatcatatcaaaatgagtgactctaaagtgaaagaaacattgcttccacagagggttggaaacaactatgtccaaacactcgcagagaacacctctcatccaagtaaaatgggggtcattaaagcccatatcctgcaaattacaattagcaaggcaatcatcaaatggcctactaggaccttcattgtaggacctccaccttgcttttcttgatggaaaatgattgtattaaagtcacctgcaaccacccaagggaaaatcatattagaactaatactacggagttcatcccaaaggataggatggttaccaggttgggggcttgcataaacaatggttaaaaaccaagggtttttgcctctagggttgacatgaaaatgcacatgaaaatgcaaacatcccaccatgaggatattgatgcttgatgtacgccacaatcaccaaatgccccgaacaaagccatcagcttcaatgcgaaagcacccatccaaatcaatcttctagataaccttgtcaaaagtagacctactaacacacaactccagaacatctataaaatctaactcatacattcttaataagtctcttgtcacacctagaaaggctcttcctttctccatgaacattccaaatgagacacttcataaggaaaccacataaaaaatggaagagagaccatagagctttcaagaggaattttggggatccactgccatagggcaagaatccttagaataatcactctcacttatgcgttgggtagcctttttagtcctttctgaagcttgaggtacaagtagttgcataacaacttgtcctggatctgaaacaatatcttcaaccatatgatctatcggcctctatgtctttggatgaagggaactctgatcctccaagcttggttgactgggcactccgttacttggacaattaacattatcatttaccatgtttgctttttgggatgggatgttgactctgagagggagaattttgttttgggctagtttcttaaggatggtccctctgatgggccaagaatctcgatacgtttccttgtgaaaagggagaggggcctagattcttattgctatattttttttccctctagattgggcttctattgctttgtttctgtttggtttggattcctttgtttggcggggttaggcttgcatctattgggcttcttagcaatcatccaaggttcgaaagtggaaccatggttcaactcatcagtaacttcgatactggggtctacttgatcgtcctctaaattagggtttggatcttgcgtaggtcttcttccgtcgtcaccatgttgtccccttcctacatcacctcaggttttgttggtattttaagcttcgctgtcagggtagggcattgatggatgcgatgggcatatttttcatacccaaaacaaatgaggtggaggcctttatattccagcttaaattccttttccagaaccatgaaagagggcacaagctccttattgaggtctaattccacacaaatactagcaaagcatcgcttgggttggatcaacatttgttcatctacttacaacatattgccctaagagctaacccattgaccaaagaaactctttattatagagtttcacagggagcataggaattcttacccatgcaaccacttttttcacaatctggtctattgtgctaaaaaagggcatccatctttgaaccaggagatagtgttccaatggcagccaagggccttcaaacatatcaaatttgtagtcctcctcagtagagaagcggactagaaaaaaatcatggtgaagatccatgacttggactgttccagatcatgccaaaagtttctacaattgtagggaaaggaatttgagattcacctttttgcccatcaattttacaataagcgagtatttccactgaccacaccattgttcatattgctctagtgaaacctcaatgttggggccagggttgaaaggcttctctggtttgttgtcatcctcctccttaaaagagtagggacaaacttcctttgtcatcgcatttataatgtcagttggggtcatgacaggattaggctctaggaccacatggacaacatcaattcccacaaaagcatccttgtaagatggagaaccttcccaaaaggggttggtcaactccttgatgtggaccactagttgtttctatcatcttaacctttttagcgtagtgttgttttgaatccctctccttcgaagaggggagggccaatttcttaaggttcataggaaagctcataggagaggagagaaaggagagagaagagagaaaaaaggctatgacattcattatttaaaccctctatatatctatttcaataattttttgttaaaataatacaagtgcgataataataatggacgacgtgaaaaggacaagttggaagtagcgctaatactggattcgaatgacacccaaaggtattcattgaagagatagaaaggagaaaagaaaaggaaataacattggatcgaatatgattggatgaatatttttataataataattcaattaaaatatattcaaggtataacatttttataacattggatcattatttaatgacttaatgttacttttgattaattatattttacatttattttgctttggtacattaaattttaaaaattttatttttatatttttgtttttaaaagtgtctcctttgataatgacaactaacaaatgttattaactttttttttatttaaaaaaaaaaaataacatcttccttgtccatcttcttcttcaaccacatccacgacaaaaccagatgtgagtttcgtccaaaggaactctattcctcgctccaaagcatgttaaccaagctcaacaatgatggtaccaacaactacctcaacgaaatcaaaatgggtaacaaaaaaaaaaatcatcaccacaaatatctgcaagttataaccactgcaaataaaaaatataaaaatcaacgatctggtgggagcacgcggtggtcgtggctttgcaggtcgattgtgttgctggcggggcggcggtgggagcacgcactactattgcacttctttctccctcttttttcgtcttcgctataccctttttcatggatattatatgcttcgctaaacttttttttctccctgcgtagccgatctctgttttagtgttgtggggtttcattggtttgatgtgttgtgtaggtgaggattcaacttgggcaaggattagctgcgcgggtcacttccaccatgcttaagaatgattgaatgaaggtgttgctgctttctataattggatgttgtttatttctcttctgaaattgggtttgagtattaggaatttggatgagttgataatttttacaaattaaaattattatagctatagttaaaaatcttcacaatatttaaattatttttcttgaaaatattattacatataatagtaaattttagtgattattatattaaattaattattttaaaatttaaatattaacattagactaactttcaaatgaaaaattaaaaaaataattaaaataatatttaaaaatatcaaaaattaaaataaaacttttaaaacttaatatactaaaataaattaactacaaaatataatagactaaaaattacattaaatcttatttaactatacattgtttgttatgtaagtaaaataaattattaatttttgcacataaaatataaactttttatatttaaaaaatatgaaaaattggactcttataaatctatatcaatatataaaaatgatattattttgtgtaattgttttttatctccatatttttatatcattttatccttaataatactaatatataattataaaccctatctctcactcacatcgttccattctcaacaaattttgctacttcctactccaactacttttttttttcccgtagccatgggtatacaaataaccaccacacactcaccgttttcttttcattttcaactctatacttcgtttcttccaatctgattttcttcttctttcttttctgcttatcgttttgttgtcaaatgaattgcatagatatatcgggcaaggtcaagatcgaaatcaacgataagtcttcttcatccttcgatctccctttcgttgtttaagatcagttcaactatttttctaataggactgtaacagacttaaacagaaataatagaaaatgattacaaataaaactttttatctaaactatttaacaattaactaaacatattagactatacattgttagtaatgggagcatataattttttaatattccaagagataaaagagatgtatgatattatgttagacaaattctatttgatccgaagagaaaaatgagaaaaaatatgatagacaaagtaaaaaaaatcttattacatttttaactactttcttcttctttattattattgtttactttattgtttcgtttaagtatttttaaaggtaaaaaagaaaaaaatctaataatttttcccttatcacattcatactacaagttttttaattatttttattacctatgtgcctttaggaaacaaaagtcacgagaacatataattttctaatatttaatgatgatgtaaacatggatggtgttgtgttgacaaagtctttgatttgaagagagaatatataagaaatgatataggcaaagtaagaaaatctcttatattttatagattttttatttgtgttatgtgttattttatttacatttctaaataaaatttcaaattagttgtcttttattaatttcttttttgttttttattgctctgattatctttctctcatttttnnnnnnnnnnnnnnnnnnnnnnnnnaatgactttaacataatattatccttaatttttttcttctaaaaatataaataaaaatattaattaattaattttcattgtcctataaatttcttatttaccaaacgctagtgaaaaaacaaacaccattgtatatttttataatttgttaatttttggtataaatgtttaaaaaatgataacaaacttaaaaacactatcaaaggaaacatgatttgaatatttttttttgttttgcaaaaaatatttagatatccttcaatttctatccatatttttatatttactttatatatttatctatttcttttatttttttcttcaccacatatcttactttgaaatataaaaataaaattcttagaattaaaatatatacattctaaaagcaaagataattaaagatcaaaataaatataaaaaaaattagtataacataataatgttaccatttcaatattttacaaatacatttgtcaaatagaataatatcaaatattatttacaaacataatacattaatatatcatattattataacaaataaaaagaaataagaaataaaattatatatattacaaaatatattaaactaaagttaatatacatattaatttacatataataaaatatattattttaatatataaattttaatacaataaaatataatagcacaataaaattacaaacactaagaaactgtgtccgctgataatataatcggaatctaaattttgacagtgtggtgttgattggaagcaatagcatgacagcatcgacacgccaacacatttcattggtgcaactgcgtacgacaccacaatccaagattttctctcaacacatttctttgggtctgtcccattcaattcaatacgtatattaatatattttagtaaaataataattaatttacaagagatgaattgattaagtctcatttctgacatctcgtaccatttccattagtatattttatatgtttaaatttcatttttatttttataaacataagatgcaaatattatatatatatatatatatattgatgcacttaaaaatgaatctaatatatgtatttgtttcaaaattaatataaataaaattataaacactaaaatttcaaaattatattcttatactaattctatttttaaaattgattaaataaaataactaattcctatcataattattaaggaattattacaaactattaatttacatttttattttatatttaatacacatttatattaggaaattttgtagtattattacacaatagttcgtcttataagataaaaataccttttatgacaataatgtatttgtttttaattttcaattttggtagaattgatctttttaaaatattttggatgtaatattttaaaactgagttaaaaataattgtttaattattaaaataaatgtgtttnnnnnnnnnnnnnnnnnnnnnnnnnnnnnnnnnnnnnnnnnnnnnnnnnacctaaattcaattttattcaataaaagttttaaaaaaaacttttttcaaaatcaattctacccatttccataattaaattttaaaatgaatattttttaccataaaatgaattccttttctttgctgaatttgtgattttcaaagcaaaacaaactgacatgcatttttttagaaaatcaaataaaaatatttgataaacaccttatccaacacttacaaagaataataaagaaaaaatataatgaaatttatgatatgatataaaaaaagacataaaaataaataaaatnnnnnnnnnngatttgtgtatcaaatagtgattcaatgcaaatctaatcatagaaaaaaaaagtagttcaatgatggcatcatatcttttgcacaaatcaaatccgagaatagacagcaagcaaatgttttattatcaacctccttgatgacaaatcataaaaatggtagttaaaacttcaatctatgaaaaaaaaatggtagttttttttaatttttttttacagttcagtgcaatgtaatttggaaagaaaataaaattacagctcatttaaattcaatgtacatgtgtggttggagtttgatattttttgggaataatttctgaaatttaaatgataatagaagagcggtggcaaaaatagtaattaatagtaaggttaaacggtaatgttcttattctcatgagaaaatcatacattcagcccataaaaatgaatcacaagcaaaacatgacaattttactttcttgaaaatcaaccatgatgaataatagtatttttctaatatttatacttaacataaaaatgttattacaacaacaaagtcttctcttctctcactagttgaaatcgactacataatcacacgaccccacatagaaaagttacaatctcgtattaactttttgtggaatgattgcacaaaacctgaaatgaattcactagtcaaacattgtgtattggtctaggagaagaatagctaaattttctggatttgatagattatgagtgtattttttagaagttgatggcagaattggcgaccaaagccagcatctagcagggttttttttgggtgaattacaaactagaggattaacagcctacgtttatttctgcactcccactattgcattggacacctcccattgcatttcgaaatgcagatttacatttcaaaatgagtttttcagaatataatgggagatttagaatataatagtgggggtgcatgatacaatagccctaacagcctctagggaaaagaatcggagcagagtccaatctcaaagcatttaaaatacaatcaagagcaaactcaagaacatcgaactcagaactgaggctcaaggcttgtttagccatttcatccgcaacttgattagccaccatttagcagtttgcagatgcatggttaatgataaaagctcgaattaatagttacttaatagttgacatataaagattgcaaaagctaggttagaaatgcaattgttcctaaaagcatggtgtatgatattaactattaatttaaatacagataataaagatgcatctaaataagaattactcctacaatcaatttgatttccccctctcagctaacttccaaagttatatctatgcattttttttttttttctggtgaaaaacaaaagaatccactggtatagtaaggggtttaaaatttaatagaaaaatcataaagaaaaattatatataccgaacatctatgcttcctttataactacaaaactggaaaatctttgattacactactgaagaactgtgaatgaagagagcaatctcaccataaatattcacaacaaaaagtaacaaatctacgaccatgtcataagctagaagtcctatttgatggaggtccaattcatttaagcatgcagcctaatatgcagtttaacaaaaaaaatcactagtaagaatccaagacagtgagagtgcacaaacaggtatatatctcctctcaacagttcttaaaagagtcaaccaagaagaaatcatgcgacattatttaagttggtatcgaccaaatactgacttaaaatcaaacatatacccaaattcgggtttgaagaaatttacaagagaaatcaccatgcttgagatcaacatcatgtgttgcatcaatattgaaatggacctgctttgtgcttaccttctatatattctcatctacaaatttaagcctcttacagtgatcagattaaccggattgacggaggattacctgctgggaacctttgtctacggggccttctggttgtcttgccccaacctgttaggcttctatcctccaatcccaccacttcaatgttactaagctgcttaataagtggggtgcttgtttcaacagttgccacaggaggagggggaggagttggggtaacctgtggctgtgatcgccgcctacccctaccacacccattcctagaagagcttctcctgtttaatcctgaattccatgcatgacctgttgctttcatgagtcctccaaatgtttggagatcttctgtaacttcatgcctcgataaagatgcaaggcctggaaggatatccctttggaagtcccttcgctgcctccctctcctagctggcccccttcgtgtccgagtaggtaacgaggttgttccaatttcttcctctttgaagttttccggaacaaggggctggggcatgtagtcttcttccttggtctctgtcagtttcaatgtcattgattcaaagtaatccattccatctgaggaagattcttcattatcctccacatttttttcccttgaattatcagtcttcttctgcagatcatccacacacgaggaaactatatccacaaaccaacttagagggtccaccaccaggccttctgatggactgctgatcacatcatcaacttgctggcagcaagaagatgacaagacaacaattgcctctgctgcatacctcataagttcatcctgcagcttttcaactgtgtcttgtgggccaagtagcgatactagaggagtttcaagcttcttttcttcgggaatggcatcctcctctgtctcagaaacagaaagggtttcaagatctatttctgccatcgtttctaacttggttgctggaatatttgtcacaaatgcttcatcctcattcatactcaagttcagatcaatctgatttctagagttggcttttgttgaggataatcctgtctcacaaacaacaacttcagctacagcttgttcgtccaactcaggaacagcagcatcacaaggcaagttaatatcaagtatctgttttatccgataatttcccactaattctacatcagatggattaggaaccgacacagatggagaggtgaatgaagataactcagcagaaatatgaggtatgtcaaatataggaacaccaagaattttccttttactagaactctcgctaacttctctcctctttggctcaatatcatttgaacacaaacctgtagttaccttgtgaataaattttccattagacccctttccagtttcttctttgttagatgaagaagaaacttggaaaacagttaaacctccagcattttgtgccacattcttacatgttgtcttggatctaagccaaggcaacactgcaagctgctcctcatgcttctgttctctatccatgattcccagacctgactgggaaactaagttgttggatgaagcatttgaaagtatctcattcaagttaatattttttgcagacttcatgtcattgcaatttgaattcaaatttgaactcttgtagcagtttgctggaccattattgaagtgttcaggaaatttcttgcaatcactatcatggttgagatagctaattgaagagatgttcactgacagctccttggacccagataaagtcccggggtaaaatccatttttcccagatgcctcacatcgaaaaccaggattaagctttgaattgatatttagaggccaactatctcccaacatcccattactctgatgtgactgggaactcctactcaaggaaccagatgcatttagacatggagatggaggtgtctgtagagatataaacttctggtttagggtactacttgccatgtcccaagatgagtgagaccaagatctagctaaatctgaggaaggagcaattgcaaagagaccatgcctatgtgatgatgcaacagactctgaaagcttattagcagaggattcatgatttctttcactgatatctaaaccactaggtgtcctttccctcaacaaatcagtcttgcttcgattagttagataatcagatgtaagctcatgagatttactgagttcatcttgcattgtttgggaagataaaagtgattggtcttgtttgaggagttgaggaatgggttttgcattgcttttagcttgccctgcaatcattataaacttaattttatgacacaatttatcatctatcacatcaatattagtacttgtttactgccacataatcgaaaaggaacatttggtaaaaagaaatagatatacaaatgcaatgattttctatataattagcaaagttctacttggagcaaaactatccaattcactaatgttaaaaaatatagtttatcagcttattttaacaaaatcatcacaaacaaatgccaattagctaacgtttgtctttgaaatgtatcagataggagacgcaggttcaaaatgtaaatttgaagcaagcagctcaagaagaaatctaacctgactctattgaagaaatccacaattttccattcctgtcattatccaaatatccattattacgagcccaactgtcagttccatgatgtgagttcagtaaatcttccttggacaaaccaaagaacctcgacttctgtttggcagatagatcagaatcagaacattcagttgccccttgataggaattatggttctgaggaggaacatatgcaacatcatttgtttcttctgcatgaacgggttcatttaagtctgccaaaccattttcacttcttaaagactgcttatgcttaggtcttgaaatgtcttcctggccaccagtcttgccaccattgccactaaaaaggttcataacgcctccctttttgtgtttacaatttctatcagaaagaaaatttgtggtgccactaatcttttcatcaccaggcttttcattttcttcagtatcaatgtactcatcagcagggaggtgaaggtcaaacatttttctcctcacctttgagggtctgaaccccagtatatcaacatctttcgagctactactcccatttggggatgggaacagaccagcttgcttactgattcctttattagaactcaaaggagaatgaatgccctcaacgcctgaaatagatggtctagcacaagtagaacttccaactattggaaatccaggaacatgccattttttaccatcttcagatgttaactgagatgccaagggacctgtggaaaatgatttctcaacagatatatggtttctgtataaatctttcattttaacttcatccatcaaatccctttgtattctgtataagcggtgaagttcaaagacctgattaaatacataatataaatatatcaaaaggttcactaatcatagggttcataaataaatcaagctgaaaaataccaccactcaagaaaaacctcgatgtaaaattgattaaaagtcaattttacaacaaactactgttgataacatacgtgaaatactagcctctgcaacaattgaaaaaagagacatttaaagagaaaaaactctggagaagcacagaaaatcaaaattcacaattcaaaaagcctcgcacttttattttttaatggaccaatactacttaatcctttaacacctcaaaacttcctcattgatattatttgagctagaggccaaggggtaaaaggagctaaaactttcatacctgattcttaaatatggcctcatgctcaagcatcatctgcttcacattatccttatcatgtgttgaacatgcatctacaccaccacttgacagataattatgacagtactgcccatttgccagtgttttatctccataatataggggccaaccgcaactactggattcctcattaagatctctcattgagtaataccctggcagactctgaactttggttcccatccctgaaaattgaacagttatatttaaacgagttttactatcatgaattatctggtacatagcttctagttcaactcaagattatcacaatccatacaatatcttaatttatttcagactcactaagaaggtatgcactttggttaacattccatatattgtatgatgtcaaataccacaaatagtcaaacacaatccatacaagcatccaaatacttggatgactcaaatccagatttaatgatatgacatgtctgtgctaccaaagatacttgcatatcaagaatttttcagtttttcttcttcttaatttatccattaaattgacttgaatgattaagggaacttctcagtagaaaaagaagtagtattgattaataagattcacttcctttaaagtaaattgatctatgtctacaatgaatgaaactaaatcttcaattttaatttagaatctgcacaacttttagcaatccattttatttggagcagaaaacaagttaaatagattagtaattaatgaaagaccaagaggagagcacctccaaagccatgctacttttgttagcccacttcatataatgaaaaaaaaaatgtgggttaccataaaaagtgcaggaaagcaacatgtagttaagaaaggatttaattncttagtagataaatcttatacacttccaaagagacttttgcatcctaatcttaagtaataactattgtattcaattgaaaaacaaaaatgctcactaaagaaccaatgtggccatcatctcctagcagtcacatatttctctttggcatatgtaaagaagcacgtataaatgttttactttttaattcgagatgtgtgaagttgtagtttcagctgaccacacagtgttatattataactcccaattcacatgtgcattaccactttaaagcctttaaatgcatgacaataaagaccttgcccccaagttatgtggtgtacaacaagaatctagttactactttcaactccataaatcagcttttatctagaaaaaaaaaatgtgggttaccataaaaagtgcaggaaagcaacatgtagttaagaaaggatttaattagaaacaaaaatttccatattagatttgcaaaccagatgcaaatggtacctgctgctagattaagctaagttcatcacatcagagcaagcatttaacttcaatagatcgaccatggtgaaaacactacttaaccagaaggaaaaaaaaaggatcaaaatatttacttgctacaacatcaagctcatgaaaccttaaaaccaaaggactccttatggcaggtagaaaacatctgtagcggcttaaaatatccgtgcataatgtagctcataccaatcatatagattaactttcaaaagccacaactacattaacgaccaattaaaataacaactcctgcattcaggagtatcggtaaatactgcataacaaatgtggcaataccttgacctagacaaatacatactacgttagactaccatagcaagcaaagacatccctaaaacattgaaatatgataagggtagaaatacccttctaatatgtccatatatttttttgttgataacttcaaccaagaatatcagtgatcacttctgacagttgaacaagcagcacttgtatgcccatgacttatcaagaatcaaaccttttgtcccattttccaatttcccaataaaataccaacaactaagctaaaattaccaacaatgagagggttatttacttatttttctttcttttgcatagttctaagtatattgatggaaggcaaaaggtttgaatccgacttgtcacaccacagcaatagtaaccacatttgaaatagtaatggacaaagaacacaaattcataatttactatcacggcaaaataaacaatgcccaaaagacactcattaaagtatcacaaccatatgagcaatctgtatgcttgtctatgatttcataaataatacaagacttatctacaaatgtattaaaacccactaattttccaccaatagttcaaggactgaggaattcccaaaattccagtgaactaattattagctttcaactttgatagctacacataagctcatcactgtaataaaaagaatctacggagaagggaagtagctctaaactaagcagcacaaattgatccttgacacgagggaacttatgtccttcactccaattttgagtcaaaagaaagaaggacaaataaaagtaatagaaaatccatattctatccataaaagtaactgataaaaaaaataaaagcaacagaaagaccttaattctatccataatcctctcaattcaattagaggaatacaacaatttccggtcttcatttcatagacagagagattaaaaacacactcgaaaattcaagcgggagagaacctaaatgaatgacaaaattgaattaagcagatcctatacaacaattaacaaaccaacagacaatatcttctagaagaattttattaatacactaaaacgaagcgtaagaatattacagctacacatacaaagcaaaacaaataaataaaaattaactcaaagttaaattaaccccgaaaaaataggaacccagaatttcattttcattttcaatttcatttttcatcgtactcaatccagtagctctaaaataatagaaaacaaaaccaaagaaatttaccaaaccatcaaaattacgataaataagcacaattcagaaaaagtattgcgaaaattaccttagacccacatcctctcatcacgtgctcttaagaatccaccatggattttccaccattcaacatcagaaaagaagaaagaaagaaaaaattcagtgtttgactctctctcactaagcaaaaaaaaaaaaggtagctaaaaccaacaattgtagccgaaacaacgtagtgggtatttctgcaacaacattgaagaagcttagatcgtcgatttcgatctactggggccactcttgttcttcctctttctctctctcgcataaatggaagaacaacaatagaaacttttctttctttattttttgtttagagagagaaagaggaaaatgaaaagaaaaaaaaaaaaaaggagaagaatttgcgaagaagagagagatcccagataagaaatcttcacagcacaaacaaacgaccttctaagaacagtgacatgaaatttgtcaacatccggtctctttatattctctgctttttcttcacttctctctctttctttttcatttttataaaacaaaaataaataaataaaataaatatgatttatttatttcggtctttttgaggatataaaaaaaaatcacaaatgcccatttctagattctctccaccctccttgctttttggtacagatatatcaaatcaagcattattaaaatgtaaccaaatggctattacataacttttatttaatgataattgatattgatattattgatattagctaatacaattataaaagagtagtaaatttattattggatctttgttattatcattattgtcttagttatagtaaaaataaacacagtactattttaccaagcatataaattataaattaattgagacaattattttagctacaggtttggattaaatttatttatataattatattaaatacttaaaattgaaaagagatttgttgtttattaggatgtttggtttgatggtgtaactgtagtaagcaaccaaagtagtagtgagatcgtgataaaattaaagcagtccaatattactttgcactgatcatgaaaataaaagtaattcacttttaacacaacatcaaataaaaaacgctttatgataatttatataactcgaataatattttaattacctctaataataaatatctgcaatttagatgacaaaaataataatatttttttgtttacattataaatattttttattagagattcgagttgggtaatatcactacaaataacaaaattattctttcaaatatttaataagattacatatggatcaaacaacaataattttatgctatttgcgtacttgatgataaaataaggaccagtaaaatgtaatgtaaatggaataaatttgccaacatgtctgtattactccaacagcaacgggcacaacaaacttgactaatattcaatcttttataggctagttgttaggactctataatgacttattaatcagcgtaatcatatttatttaagaaaactgccatcctaagcagagattattaaagaaaacaagtggggcccaggaaactaggatgaaagattaggtgtttttttttcctgaaagggttgttgttgttgcttaatgtaaattagcaatgcaaaatgcccgttggggttctaatatttacaaaaatgggattttggtgcttttcttctactttatgttgtgttattttgttttcacaactttcaagcattggttgaaggattctttggctcagtccttcttctatgagtattggacctctttaatctttatagaaaagaaggaaataaattgttcccttattgtattactgtgatcctcatagacacgtgtctgctttaatagtggaccacctcgatcatgcacaaaattacaaccccagtttcgatgttcaattgtaattttgtattacatcttataattagagggaacaaatctttattggatcatatatttgaatcttcagtttaagggaaaaagtgagaagagggtcggcatggaatagaaagacatttatgtccaactcttgccataaagactattgcgttgtcatgcattgcttttggatgggacagcatatccatatggtgtacgaatttattgttcatcatgtcatatataataaattccacccccaaaaaatgtcttgtataataaatttgacctttaaattctcataatctccttttttttatatataatttacatgccattttattttgtaatacagaccatatcttctaaatttttatataatcaatatactttttattttgtaataaatactttttattagtcaatgtacttttcaattttttaaaattataaattttaactatttgtattctacatgcaaactatattagtttttactgtcagtaaaataatcttatatcaattcatttttttgtgaacattatattaattaaagtaatcttcttttaaacacttttgaacttatatttataaaaaattgttcaatgtgcaaaaatacttaccttaccaggaatactttgaattaattgaaattctatgaaagaccaaatccaacatttgtcatctaccaaaaaattgaaaagtcgactgtctttgcattttatatcgggaatcgccaattatctctaaaattctaaggtagatgtttctttaattgaattgtttttgctttgtttcatgcacattaatgtgaagatattattttgtaaaaaatttaatgtgaaaatattaaagtcaagatctaattaatattaaacgtataaattgttcccagttttttactttgtaaattaacttttaaataagaaaaataaatgttgtggctttctttcaaatatcacttcttattacaattaattctgttattttggggagaggagtttgatccactattttcaggtttcagctgagtatgtaggatctttaatttaaagcctacaaggcttttcttatcaagctttaatgtacttatatttttaaggttcagatttgatattatttattaaattagaataactttttgcattgatttatagtacatttaactcttttaaatgcaatgaagagaaaagtttaaatcaaacctaaaattttacagtacatttaactttttgcattgatttatagtacattacattttaaaacatttttatacaatttacttaccaaagttagaaaagttaaaatgctgaaattaatgaagaaaattcttaaatcgaataatgaggcatttttttcattacatatcttgtattatgaaggatttttttttatcttctaaaatggttcaaatctacaaattaatgcatatctaaataaacgatattctacataagaaagaaaggtggagatataatggggtatgagctcggtcaacatgagcgattgtttatggtaacaatgtcaacatgagcctaaacaattatttatatttagttggatggtaaagtataaagagagataagttatcaatataaaagaaaacagataacttctctaaaacatgataatttttaaggttgattctgatatcgatttgtcaagaacaaaaataattatgattcataattattcaaatatttttcatcttaaattctttttattgcaaaattcattaatatttcatttataattaaaattatttaaagtatcaataacatgaataattaatattattttaaaagttgttattaatgaaaatatgaatagttaataatcggtataaaatcatctaaaataaaattatttaatttactttgtgacatagtaaatcatagattgaattttaacattttaatttattctagaagagtttatcaaaattgaaaatgtatctatttgttatctattttgttacaaaatgtatattaattaattttgttttgctttaaatgattttgtatgaattattaactattcatgttattgttaaaaatgatttttagaataatattaacggttaatgttattgttactctaaataatcttgattatgaataattaataatgagttttataacaanttgttttgctttaaatgattttgtttgaattattaactattcatgttattgttaaaaatgatttttagaataatatttacggttaatgttattgttactctaaataatcttgattatgaataattaataatgaattttataacaaaagaaaattcaagaccaacaatattttcgtaattatgagaacaattggtttaccctagacactaaaaatcttagaaacagtcctttgaaaatataagatcgataaaatgattaaaaaaaagagatcatggggttcaattcctccaactaacaaaaattaataaaatatcaattaatatttgcaaataaaaaacataagaaagataggccgatctatctatttcacagagtaatataaacccacagcaagctattgcagtcgcgtttgcttaagattaattttgaaagaaaaaaagagttgttttgtttgaaaagtatgttttattttagttataaatataacaatttttttcctaaaaactcatataataaacaataaaaaataatttttttgttacaatgaaaagagaaaataaagatagaaagtgtatctcaattcaaatggttcccaatttaaaaatataaaaatgaatttatttaaaaaaactgagacacgaatgtaattctatttttatgaccagaaaagagttggtaagtaataatgaatacacgtgnnnnnnnnnnctctttgtatgttttctatcatataattattgatgtatttacttgaatcttgaatcctttccttttttatttgcataattctgattttggtaaaaaacacaaacttttgaaaataaaaaataaaataaagtaacgtttttcagttacaatgaaaagagaaaataaagatagaaagtgtgtctcaattcaaatggttcccaatttaaaaatataaaaatgaatttatttaaaaaaactgaaacacgaatgtaattctatttttatgaccagaaaagagttggtaagtaataatgaatacacgtgaaaatgattcgctttaactgggtccgatttacagaagcgagcaaagttcccaactattactttcctttcaagtttcttaaaaactatttatgttaatttatataaatttgttttttttatcatctttatataaatttgtaatttgataatctattgatataactatacactgaaatttgtttagttttaaacttttttatacattcgtccataataatgtatattaatctaaaagataatgaaattaaactcaaatgattaatacataaaatctatttaacaaaaaaaattatatttaatttttttcgtatgtaaattttttaaataagtaataattacgtattataagtagacttaggaaacatatgtagtttctgatgtttaataaaaaaagtaacaaaattaatttattttaaaacaaattcatattcgaatataaaaatgaataatttaaataaaaatatatgttacaaaattatttctttacataaactaactattcttatattgcattaattgaaactcaatcaatttctggatgcctgagcacacttcattcttcgattacaacctagcatcgtcaattatgaagatccaaatccaaggaattgcaacctgtgtagtctttctgtcagaggtgacatttgtactacagaagcagagagtggtaacttttttttattcgttgtttatttaacaagcaaaaagcagagacaacgaccttaccgtcatgtttcaaaattttatttacctgaatgttatatgtagagtaaatttttcctagattgtcacccgacctattttgttatccaattcagcaaaatatgtaattgatatgacgcaaattttttggtcacgtattttattataggaccagtgaaatacgtggtcaataacggatagtccacatgacataccaggtatttcacttggaccccaaagaattacgttggtgttgatattgaatatatagattttggaaggtcataacttttgattgaaaagtccgattgagataaaaccagtgacaaaacgctcaaaattgagacgagaaggatttggtcaaaaaaattccaaacaaagtctctaagtacttcaaaattatgatttaatctttggcatccaaaaattttcttattttttctaatttttaattattcaattagttaatttaatggtaatttttaatttttttatttacttttcttaatttcgagcattttggtatatcatacgtctcaatcgaatatttctatcaaaagttatgataatttgaagtttatataataaatatcatcatcaattgctgcagggatattcgtaaaataggtagagctgtcaaaacgggctcaacccgtgggtcagcccattttggcccgcaaaattggtgggttgggttacaaaaaagctggctcaccaaggtcccgggtcatttggacccagctcacttaacccgcaacccacccgggttgaacccgggtgagcagggttggctcgcgggttggagaaaaaaaaaagataatgaaaaaaatgaagatgataaaaatgaaattgatttgtcaaaccatgattctaatattcttcctagacaacttaatattgatgattgagatatgagtatttgatatttgaggagttagattggtgttttattattttaatattgttgaacatatttatatttgtttgagtttcatgtacatttagtttgagattaagtttgatgcagtttgtaatatttaaatttacttaaattggtttaatttgcatttttctacacttattttgtgattttttaatgttttttatattttttttaaatataaagtgagccaacccacgagtcagctcacgagttagctcgcggaccaacccgtataacccaccaacccgtgtgggttgagctgggttaggcaaaatctgacccaccaccaaagtgagccaacccggcccggctcactttgtgtgtcaacccgtggtgggccaacccgggtgggccgggttggcccgttttgacaggtctaaaaataggacatgtattttgctggacctggtagcgaattattggggagatgccacatgtcatagtcacacgtatttcgctataacacctagcgaaatatgacacatattttgctaggcaccatagcaaaactaccttaacccgccacgtgtcctgttcatttctgacacgttgactatgtacttcgctggtgtctgtagtgaaatacatgaccaccagaatcgtgccatgtcagctttcctatttcgctggagggagtagcgaaatacgtcacgtgactgtttggtaaaaaatactgttgacgtggcattcaggtaaataaaactttgaaacgtggcagtacggtcgttgtctccaaaaaacatgcataacacccacaataattgtgaaattggttctgtcatttattcgaactagataataatttagtaggttagtagtttaattggtgaatcattaattgacttggtttaatttaatatatattaaaaatttaaaattatatatgtatttattatatataaatatataattaatattatttgagtaaaaaaaattatctatatttcaaaattcaaaataataattgataataaaccaaaatttaattttttttaaaaatccaaaattcaacattttttttttttgtaaaaccaactgggttggatcggtccaatcgggatccgatgacctaatcgacaagatttggcttggtcattatgggtcaattgtgtgatcgatgcaataatggaatcgactctcggttagaccaccgaatcccggttggatcgatccgatcgactaggcaaaccgagtttcacaattatggtccaagtgaatttaatcaaatagtcaacaattggtaaagattacaaatttatacatcaaatgagttagatccattgatagagattatctcgtttaagagaaaagacatggtccaagtgaattcgtcctttcattggtctccatattataaatttaatactaataacaaatgattaattcaagtaatattagacttagtctccttaaataagacgagttcaaatattgtgaataaaaaaaggtgagaactttactaaaagtggtcaaccgacaattaagttatatgacaaaaattatcgacaaagtcaataaatattttatatcaataacattataataaaaaattataaattcaattatttgttattaaataattatttaaagtattattttttgtggttaagtcacgtaccttctcttatatatttaattttgtttttaatgtataatttcttattctttcaaatactattacataatttgaatttgatttaaaatttaaatcatgatatattgcttcaaattttaaattgttgtaatcttaattaattcaaatttaaatttgtttttgaattttgacacnnnnnnnnnnnnnnnnnnnnnnnnnnnnnnnnnnnnnnnnnnnnnnnnnnnnnnnnnnnnnnnnnnnnnnnnnnnnnnnnnnnnnnnnnnnnnnnnnnnnnnnnnnnnnnnnnnnnnnnnnnnnnnnnnnnnnnnnnnnnnnnnnnnnnnnnnnnnnnnnnnnnnnnnnnnnnnnnnnnnnnnnnnnnnnnnnnnnnnnnnnnnnnnnnnnnnnnnnnnnnnnnnnnnnnnnnnnnnnnnnnnnnnnnnnnnnnnnnnnnnnnnactaagatacttatcaactattttaggacaagaagcttgaagatatatgtgtcaacattttagataaataattcaataagtggtatatttgtacaaatcttgtgaccgtttagttgaattagagtatataataagcacaacagcatttttcctgggttacgaaaattacacacctttatactaacacgttagacaaggaaataactattggttactaaaaaaacatgtatgtatgtttgaatccatactttaatatagtttacaatttttgccttttcagttctttgatcaatttacatttatgcaaatctttgtttatgtgttttttctccaaactcttaacttttttcaatcatcttttcttttcttaacttaaactcttttatttgttctttacgttctatcattttatcgttgtttgtttttcaatttgatttacgatttatttcaaagtctttttacattataattcttttgcggatccaaaaaaaaaaaacatcataattcttttacatttcttttaaaagtcttctcataatattattttataatgcttttacatttcttaattagaaaattataaacaaaaaacgaaggacacttgttattccaaatattcagatacaatcaaactttgtacgtgacttattaaatttatggattctggattaattgtatttattaaactttatgcgaaaattaaaagaagaatcacgaaaattattccataccataataaaaactggttaatctcataagcagtgtttctgcccgttttttctttctttgtcttttttctaaaaacttttatgttcttcgatcaacatgtttctttatatcgaaaaccttagaggataaaacacacatactccctacattttgagataggaaaaaaacacacatacttcctacattttgagatggccatttttgcaactgtcatcatcaccattgactccgctagctactatcatcatcatcaccaatgtcacttctatcatcatcatcatcatcatcatcgtcgtcaatgtgcccctctcaatgctaaaattatcattgtcatcatcattatcaccgttactgttgtcgccaatgacagtcacaccacctccaataacactgttagtgttgtttttagccaacctcgactagtgctattttcgatcaacttcgattagggttattctggatcaacctcggtcggagctatttttgacgaacctcgatcagggcaatttcaatcaacctcgacaaagagcttttttcgaccgaccttgacaatatatgttctaggccaaccttagctaaggttattacggttgaccttgattagggttgtttttaaccgactccttggtcagatatattttcattcgaccccgactagggttatttttagtctatctcggcaacctcaatcgagactatttttggctgaccttaataagtgttattttttaccgatattagctaggactgtttttcctcgacctcaaccagggaaactttagttgacctcaaccagagctatttttaatcgacctaggtcagactgttttttagtcgatttgctcgaccaaatatgcttttggtcgactttgactgagattttttgtgattgactctaattagggttatttttttgtcaatattgactagagttgtttttggaattccttgaccaatgttgttttcaaaggaatgctagaaaattcgaagaacgcatgtggtggattttggattaaaattcaataaaatgtataatctatatctaattaattagattggatttaaaataatataaaaaacttgatttggatataaaatcattaaaatgaatttaagtagtttgaatatgattggtttttatataattagatttttaacacacctatatatatatatatatatatatatatataaactgcccttcaggtaagtcgtatagataatccgaaatgagtaccttctgattaccactcaaagtcaattcaggatccgttcaggaccattcacaagataactaggaatatcacaaactgtccaaagcaagctacatgacaataatacttgggacatgtcgaaaataaaaatattaaaaatttgaaatgcagtctatagttactgtaaaacaaataattataaattagattaatttcataaattcaaaatatattttattgtataaaagactttttttgattaattataaagggttgtttttattgaggttcaatgatatatttttatttcaatagatttataaacatacatgaaagtgcttacaaaataatatttcaataatagatttataaacatatatacatgaaagtgcttaaaaataatatttcaatagatttatataaagcttctctagttcacgtgtagcaataatgttgaaacttgaagttagacttctaccccccaacacatttccttccaacaaaataagcaataccaaatgtttggatcaaaagtcaagaagtggagatcattgctgtcagaatctgcattccatgacggtgaaattctagtgccatcaatccaatatgaccggccacaagccaatcattatattaaatttaacaaaacatatgataaaatcatcaaggtaagcattcaaacatgataaaatctttcatactaaccgtgtataaccttgatggttcacaatttactacaaagtaaaaaagtagtaaaaattcacaaccacagcaaaacaacctcgacacaattatagaatcaacaagactaacctaaaagaattctgtaacgccccaattctctaatcgggtcattaccaaacatacatcacaatcaagcataaaaacaatcagagtttaagcagtttggaagcataaactagaagtgacagcatcaaagtcactatcataacactgtacatgataatatggtgaatatacatcaagattctactgtacaatacaaaactgtacaaataacccatcagggtacatcaaagtacataaccaaaacatatgagcaacatgctcaagtcctctatcctagtgtgttcttcagcagctaatcctgcacaggcttcttgccttgggacctctcggttgctctggaagaatcacctgcaaaacatagtcccacacaaggggtgagatataaaatctcagtaaactcagggcccttgaaggtatttccttcccctggttcactgaccatacacacatatatagatatcaatatcaaggcatattcacacaatcacaatcatcatcagtgaattattcaaccatatcaaaccgttacatattatccccctcatcaaagggttcagctcacctgtcatacaaatacaatcaatacatatacagtcaatatgtatatatatatatatatcaaggaaaactagaacaagctcaggcttggattcaggcacccccactcacaataacactatcagggaaacattaaatcaaatcatcaagcacatcaatgcacaacacacctgacaacaatcaggttatacacaaaccaaggcataatcataatctaaagtcatttatcacatccataatcatcacgcagaggctacatcgaggtacataggatcatctccgcacagggaggctgcatctatatactcggcacatctcttgcatgaatccctagcggaggcttcatcgagatatataggttcatatctgtacatgaggcatcaactatatatccggtacatctccttttgggtgaggctacctctgtgaacataggcatagctcttctcatgaggtccctctatgtagcacagggccatctcatcctctaacaccatacaattgcctgggaaggctacatctgtgtgtatgggatcatctccacgtaggaggctgcctccataacacaggcacatcttacaccaggtcttatccaatctcaagtcatctatcctactacaataggatagtgttcaagcatagcatgcatggtcaggtttcacattcaaccagacatgtcacaactcaatcatatcataactatgcatatcaatcccctgtcacaggttcaattcacatttcaaatataacacatcaatgcataccaatttccctctcatagggatcagaacatcagcacacagcatctacataccggcctattcaagtctcataaacaataaggcatactatcaatgaatcatacatatgttctttggtttcccttttcagggtcaagcacacatcaatttcccttatcaataattaagtatcttaattcccttcctcaggaatcaaacacaacagtcattcaacatatagctcatggccacaggcacattacccatttctgggttccactcatgtatcaacagttaatcatagcattatacattatttctctgttaccatacatacataacagaaccataaccccacgggnnnnnnnnnnnnnnnnnnnnnnnnnnnnnnnnnnnnnnnnnnnnnnnnnnnnnnnnnnnnnnnnnnnnnnnnnnnnnnnnnnnnnnnnnnnnnnnnnnnnnnnnnnnnnnnnnnnnnnnnnnnnnnnnnnnnnnnnnnnnnnnnnnnnnnnnnnnnnnnnnnnnnnnnnnnnnnnnnnnnnnnnnnnnnnnnnnnnnnnnnnnnnnnnnnnnnnnnnnnnnnnnnnnnnnnnnnnnnnnnnnnnnnnnnnnnnnnnnnnnnnnnnnnnnnnnnnnnnnnnnnnnnnnnnnnnnnnnnnnnnnnnnnnnnnnnnnnnnnnnnnnnnnnnnnnnnnnnnnnnnnnnnnnnnnnnnnnnnnnnnnnnnnnnnnnnnnnnnnnnnnnnnnnnnnnnnnnnnnnnnnnnnnnnnnnnnnnnnnnnnnnnnnnnnnnnnnnnnnnnnnnnnnnnnnnnnnnnnnnnnnnnnnnnnnnnnnnnnnnnnnnnnnnnnnnnnnnnnnnnnnnnnnnnnnnnnnnnnnnnnnnnnnnnnnnnnnnnnnnnnnnnnnnnnnnnnnnnnnnnnnnnnnnnnnnnnnnnnnnnnnnnnnnnnnnnnnnnnncctaagatgatccgcctaatcacggcctcttttgctttcaaactccgagctcccaagggttctctcagggaaatccaatctcactaatcctcaccttttctcaagaatcaatcggggtatcttacttatctcgaggttctaatcattttctcagttggttgggaggtgtttagatgaactatggagaagatacgaagcttaaccgctcatcaatggaggttccctcttttctctctgctttttctctttcctcttcaaccctaagtgaccttttataaaagcaaaccgtcgatctcgcgcgactcgcgccattacccgcgcgactcgcgccatagcactgccaaaccacgctactcgcgtggacatccacgctactcgcgtggagctccagaggaaaacatggttttccagggcacttcccacgctactcgcgccagttaccacgcatgtcgcgccatactctcggcaagcccacgcgactcgcgccgtttccacgcgactcgcgtggcattgcagaacactctgccctgatttacacatatggcgcgggtcgcgccgaaccccacgtgggtcgcgccgcaggccagaaaaccttaaaaattgcatttttaagcatctttcaaagggttctaaggcatgatcatatttccttaacccataaacttagattcatgcttaatataagcttaaacacggattaacattcaaggtattacattactcccccccttttatgaattttgtccgcaaaattaagatcatacctggtacataactcgggatacagccgtagtagctctgattctctttcccaagtcgcttcctcaggtgatctgccatcccactgaactttgatgagaggaatggtcttactcctgatcttcttctctgtgcgatccaaaatcctcatgggtcgggtagggcaagtcagattctctctaatccgcaccgtgtctggctccaccacgtgtgtagaatctgctacatacttcctgagctgtgacacgtggaatacatcatgcaatcctgacaactggggaggtaaagctagcctataagccactggtccgaccttctgaagtatctggtaaggaccaataaatctagggctaagcttcctcacacccaatactcgcccaacaccagttactggggatagtctcagaaacacatggtcgccctcctcaaactgtagcggcctgtgtttatgatcatagaaactcttctgtcgactctgagctctcaacaatttatctctgatcaatctgatctgctcagaagtctcctgaaccatatcaggtcctaacaactgcctctcacctacctctgtccaacaaacaggagtcctacatctccggccatacaaggcctcatagggagccatgcctaaactcgcatgataactgttattatacgagaactccactagaggtaagtatctatcccatctagtaccttgctccaaggcacaggctctcaacatatcctctaaagtctggatggtcctctcagtctgaccatctgtctgaggatgatatgctgtactgagtctcaactgggtcccgaacgcctcctgaagcgcactccaaaacctggaagtgaacttagggtctcggtcactaacaatactctcaggaaccctatgcagtctaactatctctctgacatatagctgagccagcttctctgcagtatggtcagtcctcacaggtaagaaatgagcagactttgtcagtctatcaacaataacccagatggaatcacatccagtctgagtcctcggaagcccaactacaaaatccatgaaaatactgtcccatttccactcagggattggtagtggctgaagcaaacctgacggtctctggtgctcaatcttaaccttctgacatactaaacacctggtgacatactcagctatgtccctcttcatccctggccaccaaaatctccttctgagatcctgatacatcttggtagcacctggatgaatactgaactggcccttatgagcctcagtcaacactgcatctaccatctcgcccttaggcaccacaatccggtcctgatatctcatcagctcatcaggctcccagtgaaactctcgtcggcccatcatatctataatcgaatcatcctgcttctgagcctctctgatcctctgtatcaactcattatcaactctggttcgactcagctcaagaccactggtaccctcagtcaccgtcaaatgcatatccctgaactgttcaatcaactcacagtccaagatcatcatgcaggcgacactcagatgtttcctgctcaaggcgtcagctacaacattcgccttgcctggatggtatctcagctcaaaatcataatccttgagaaactccacccaccgtctctgcctcatgttcagctccttctgatcaaacaaatacttgaggctcttgtggtcactgaaaaccactaactgagcaccatacaagtaatgtctccatatctttagagcaaacacaatggctgcaagctctaaatcatgggtaggatagttctcctcatgtggcttcaattgtctagaagcataagctactacccgcttatcctgcatcaacacgcaacccaaacctctcttagaagcatcacagtatacctcaaaacatccctcaggatcaggaagtactaacactggagctgtggtcaacttctctttcaatctctgaaaacattcctcacattcatgagtccatacaaatggattaccctttctggtaagacgagtcaagggtaaaaccatctgtgaaaacccctgaatgaatcnnnnnnnnnnnnnnnnnnnnnnnnnnnnnnnnnnnnnnnnnnnnnnnnnnnnnnnnnnnnnnnnnnnnnnnnnnnnnnnnnnnnnnnnnnnnnnnnnnnnnnnnnnnnnnnnnnnnnnnnnnnnnnnnnnnnnnnnnnnnnnnnnnnnnnnnnnnnnnnnnnnnnnnnnnnnnnnnnnnnnnnnnnnnnnnnnnnnnnnnnnnnnnnnnnnnnnnnnnnnnnnnnnnnnnnnnnnnnnnnnnnnnnnnnnnnnnnnnnnnnnnnnnnnnnnnnnnnnnnnnnnnnnnnnnnnnnnnnnnnnnnnnnnnnnnnnnnnnnnnnnnnnnnnnnnnnnnnnnnnnnnnnnnnnnnnnnnnnnnnnnnnnnnnnnnnnnnnnnnnnnnnnnnnnnnnnnnnnnnnnnnnnnnnnnnnnnnnnnnnnnnnnnnnnnnnnnnnnnnnnnnnnnnnnnnnnnnnnnnnnnnnnnnnnnnnnnnnnnnnnnnnnnnnnnnnnnnnnnnnnnnnnnnnnnnnnnnnnnnnnnnnnnnnnnnnnnnnnnnnnnnnnnnnnnnnnnnnnnnnnnnnnnnnnnnnnnnnnnnnnnnnnnnnnnnnnnnnnnnnnnnnnnnnnnnnnnnnnnnnnnnnnnnnnnnnnnnnnnnnnnnnnnnnnnnnnnnnnnnnnnnnnnnnnnnnnnnnnnnnnnnnnnnnnnnnnnnnnnnnnnnnnnnnnnnnnnnnnnnnnnnnnnnnnnnnnnnnnnnnnnnnnnnnnnnnnnnnnnnnnnnnnnnnnnnnnnnnnnnnnnnnnnnnnnnnnnnnnnnnnnnnnnnnnnnnnnnnnnnnnnnnnnnnnnnnnnnnnnnnnnnnnnnnnnnnnnnnnnnnnnnnnnnnnnnnnnnnnnnnnnnnnnnnnnnnnnnnnnnnnnnnnnnnnnnnnnnnnnnnnnnnnnnnnnnnnnnnnnnnnnnnnnnnnnnnnnnnnnnnnnnnnnnnnnnnnnnnnnnnnnnnnnnnnnnnnnnnnnnnnnnnnnnnnnnnnnnnnnnnnnnnnnnnnnnnnnnnnnnnnnnnnnnnnnnnnnnnnnnnnnnnnnnnnnnnnnnnnnnnnnnnnnnnnnnnnnnnnnnnnnnnnnnnnnnnnnnnnnnnnnnnnnnnnnnnnnnnnnnnnnnnnnnnnnnnnnnnnnnnnnnnnnnnnnnnnnnnnnnnnnnnnnnnnnnnnnnnnnnnnnnnnnnnnnnnnnnnnnnnnnnnnnnnnnnnnnnnnnnnnnnnnnnnnnnnnnnnnnnnnnnnnnnnnnnnnnnnnnnnnnnnnnnnnnnnnnnnnnnnnnnnnnnnnnnnnnnnnnnnnnnnnnnnnnnnnnnnnnnnnnnnnnnnnnnnnnnnnnnnnnnnnnnnnnnnnnnnnnnnnnnnnnnnnnnnnnnnnnnnnnnnnnnnnnnnnnnnnnnnnnnnnnnnnnnnnnnnnnnnnnnnnnnnnnnnnnnnnnnnnnnnnnnnnnnnnnnnnnnnnnnnnnnnnnnnnnnnnnnnnnnnnnnnnnnnnnnnnnnnnnnnnnnnnnnnnnnnnnnnnnnnnnnnnnnnnnnnnnnnnnnnnnnnnnnnnnnnnnnnnnnnnnnnnnnnnnnnnnnnnnnnnnnnnnnnnnnnnnnnnnnnnnnnnnnnnnnnnnnnnnnnnnnnnnnnnnnnnnnnnnnnnnnnnnnnnnnnnnnnnnnnnnnnnnnnnnnnnnnnnnnnnnnnnnnnnnnnnnnnnnnnnnnnnnnnnnnnnnnnnnnnnnnnnnnnnnnnnnnnnnnnnnnnnnnnnnnnnnnnnnnnnnnnnnnnnnnnnnnnnnnnnnnnnnnnnnnnnnnnnnnnnnnnnnnnnnnnnnnnnnnnnnnnnnnnnnnnnnnnnnnnnnnnnnnnnnnnnnnnnnnnnnnnnnnnnnnnnnnnnnnnnnnnnnnnnnnnnnnnnnnnnnnnnnnnnnnnnnnnnnnnnnnnnnnnnnnnnnnnnnnnnnnnnnnnnnnnnnnnnnnnnnnnnnnnnnnnnnnnnnnnnnnnnnnnnnnnnnnnnnnnnnnnnnnttctactgtacaatacaaaactgtacaaataacccatcagggtacatcaaagtacataaccaaaacatatgagcaacatgctcaagtcctctatcctagtgtgttcttcagcagctaatcctgcacaggcttcttgccttgggacctctcggttgctctggaagaatcacctgcaaaacatagtcccacacaaggggtgagatataaaatctcagtaaactcagggcccttgaaggtatttccttcccctggttcactgaccatacacacatatatagatatcaatatcaaggcatattcacacaatcacaatcatcatcagtgaattattcaaccatatcaaaccgttacatattatccccctcatcaaagggttcagctcacctgtcatacaaatacaatcaatacatatacagtcaatatgtatatatatatatatatatcaaggaaaactagaacaagctcaggcttggattcaggcacccccactcacaataacactatcagggaaacattaaatcaaatcatcaagcacatcaatgcacaacacacctgacaacaatcaggttatacacaaaccaaggcataatcataatctaaagtcatttatcacatccataatcatcacgcagaggctacatcgaggtacataggatcatctccgcacagggaggctgcatctatatactcggcacatctcttgcatgaatccctagcggaggcttcatcgagatatataggttcatctctgtacatgaggcatcaactatatatccggtacatctccttttgggtgaggctacctctgtgaacataggcatagctcttctcatgaggtccctctatgtagcacagggccatctcatcctctaacaccatacaattgcctgggaaggctacatctgtgtgtatgggatcatctccacgtaggaggctgcctccataacacaggcacatcttacaccaggtcttatccaatctcaagtcatctatcctactacaataggataatgttcaagcatagcatgcatggtcaggtttcacattcaaccagacatgtcacaactcaatcatatcataactatgcatatcaatcccctgtcacaggttcaattcacatttcaaatataacacatcaatgcataccaatttccctctcatagggatcagaacatcagcacacagcatctacataccggcctattcaagtctcataaacaataaggcatactatcaatgaatcatacatatgttctttggtttcccttttcagggtcaagcacacatcaatttcccttatcaataattaagtatcttaattcccttcctcaggaatcaaacacaacagtcattcaacatatagctcatggccacaggcacattacccatttctgggttccactcatgtatcaacagttaatcatagcattatacattatttctctgttaccatacatacataacagaaccataaccccacggggttgatggtggaacacagcagaggattcacaaacaagaaccaagagcttacctgctctagacaagtcaccggttctcccggtcccgtggtcaacaccacctgagctatcaagctcacgtcctacacaagaacaagcatatatagtatcagatacggttcttgtaacaccccgtgtatacccggtgtattatcattgtataatcatcagattagcgcttaatcaaagttaattaaaacctttttaaaacaagtttattgcggaagcataaaaccgaaaaccatattttctcgatggcagtatgtatggactcacaacccacaacaagcttaacacatgcccctgcttaaccagatcatacaaaccaaccataggcagataacacagatatctcgaagatataaacatacaggaggaaaccacatcatatatatatatatatataaccgagttaaatatatacaacaactggcacccgaggtgcatatacaagatgataagcgtccgagcgctttctgatcccgaggatccttcctcacacgagggcatgcaaatatacaagagagtatacaaaaacaactacatgcgcaacgcatgtcttccctcacaggggnnnnnnnnnnnnnnnnnnnnnnnnnnnnnnnnnnnnnnnnnnnnnnnnnnnnnnnnnnnnnnnnnnnnnnnnnnnnnnnnnnnnnnnnnnnnnnnnnnnnnnnnnnnnnnnnnnnnnnnnnnnnnnnnnnnnnnnnnnnnnnnnnnnnnnnnnnnnnnnnnnnnnnnnnnnnnnnnnnnnnnnnnnnnnnnnnnnnnnnnnnnnnnnnnnnnnnnnnnnnnnnnnnnnnnnnnnnnnnnnnnnnnnnnnnnnnnnnnnnnnnnnnnnnnnnnnnnnnnnnnnnnnnnnnnnnnnnnnnnnnnnnnnnnnnnnnnnnnnnnnnnnnnnnnnnnnnnnnnnnnnnnnnnnnnnnnnnnnnnnnnnnnnnnnnnnnnnnnnnnnnnnnnnnnnnnnnnnnnnnnnnnnnnnnnnnnnnnnnnnnnnnnnnnnnnnnnnnnnnnnnnnnnnnnnnnnnnnnnnnnnnnnnnnnnnnnnnnnnnnnnnnnnnnnnnnnnnnnnnnnnnnnnnnnnnnnnnnnnnnnnnnnnnnnnnnnnnnnnnnnnnnnnnnnnnnnnnnnnnnnnnnnnnnnnnnnnnnnnnnnnnnnnnnnnnnnnnnnnnnnnnnnnnnnnnnnnnnnnnnnnnnnnnnnnnnnnnnnnnnnnnnnnnnnnnnnnnnnnnnnnnnnnnnnnnnnnnnnnnnnnnnnnnnnnnnnnnnnnnnnnnnnnnnnnnnnnnnnnnnnnnnnnnnnnnnnnnnnnnnnnnnnnnnnnnnnnnnnnnnnnnnnnnnnnnnnnnnnnnnnnnnnnnnnnnnnnnnnnnnnnnnnnnnnnnnnnnnnnnnnnnnnnnnnnnnnnnnnnnnnnnnnnnnnnnnnnnnnnnnnnnnnnnnnnnnnnnnnnnnnnnnnnnnnnnnnnnnnnnnnnnnnnnnnnnnnnnnnnnnnnnnnnnnnnnnnnnnnnnnnnnnnnnnnnnnnnnnnnnnnnnnnnnnnnnnnnnnnnnnnnnnnnnnnnnnnnnnnnnnnnnnnnnnnnnnnnnnnnnnnnnnnnnnnnnnnnnnnnnnnnnnnnnnnnnnnnnnnnnnnnnnnnnnnnnnnnnnnnnnnnnnnnnnnnnnnnnnnnnnnnnnnnnnnnnnnnnnnnnnnnnnnnnnnnnnnnnnnnnnnnnnnnnnnnnnnnnnnnnnnnnnnnnnnnnnnnnnnnnnnnnnnnnnnnnnnnnnnnnnnnnnnnnnnnnnnnnnnnnnnnnnnnnnnnnnnnnnnnnnnnnnnnnnnnnnnnnnnnnnnnnnnnnnnnnnnnnnnnnnnnnnnnnnnnnnnnnnnnnnnnnnnnnnnnnnnnnnnnnnnnnnnnnnnnnnnnnnnnnnnnnnnnnnnnnnnnnnnnnnnnnnnnnnnnnnnnnnnnnnnnnnnnnnnnnnnnnnnnnnnnnnnnnnnnnnnnnnnnnnnnnnnnnnnnnnnnnnnnnnnnnnnnnnnnnnnnnnnnnnnnnnnnnnnnnnnnnnnnnnnnnnnnnnnnnnnnnnnnnnnnnnnnnnnnnnnnnnnnnnnnnnnnnnnnnnnnnnnnnnnnnnnnnnnnnnnnnnnnnnnnnnnnnnnnnnnnnnnnnnnnnnnnnnnnnnnnnnnnnnnnnnnnnnnnnnnnnnnnnnnnnnnnnnnnnnnnnnnnnnnnnnnnnnnnnnnnnnnnnnnnnnnnnnnnnnnnnnnnnnnnnnnnnnnnnnnnnnnnnnnnnnnnnnnnnnnnnnnnnnnnnnnnnnnnnnnnnnnnnnnnnnnnnnnnnnnnnnnnnnnnnnnnnnnnnnnnnnnnnnnnnnnnnnnnnnnnnnnnnnnnnnnnnnnnnnnnnnnnnnnnnnnnnnnnnnnnnnnnnnnnnnnnnnnnnnnnnnnnnnnnnnnnnnnnnnnnnnnnnnnnnnnnnnnnnnnnnnnnnnnnnnnnnnnnnnnnnnnnnnnnnnnnnnnnnnnnnnnnnnnnnnnnnnnnnnnnnnnnnnnnnnnnnnnnnnnnnnnnnnnnnnnnnnnnnnnnnnnnnnnnnnnnnnnnnnnnnnnnnnnnnnnnnnnnnnnnnnnnnnnnnnnnnnnnnnnnnnnnnnnnnnnnnnnnnnnnnnnnnnnnnnnnnnnnnnnnnnnnnnnnnnnnnnnnnnnnnnnnnnnnnnnnnnnnnnnnnnnnnnnnnnnnnnnnnnnnnnnnnnnnnnnnnnnnnnnnnnnnnnnnnnnnnnnnnnnnnnnnnnnnnnnnnnnnnnnnnnnnnnnnnnnnnnnnnnnnnnnnnnnnnnnnnnnnnnnnnnnnnnnnnnnnnnnnnnnnnnnnnnnnnnnnnnnnnnnnnnnnnnnnnnnnnnnnnnnnnnnnnnnnnnnnnnnnnnnnnnnnnnnnnnnnnnnnnnnnnnnnnnnnnnnnnnnnnnnnnnnnnnnnnnnnnnnnnnnnnnnnnnnnnnnnnnnnnnnnnnnnnnnnnnnnnnnnnnnnnnnnnnnnnnnnnnnnnnnnnnnnnnnnnnnnnnnnnnnnnnnnnnnnnnnnnnnnnnnnnnnnnnnnnnnnnnnnnnnnnnnnnnnnnnnnnnnnnnnnnnnnnnnnnnnnnnnnnnnnnnnnnnnnnnnnnnnnnnnnnnnnnnnnnnnnnnnnnnnnnnnnnnnnnnnnnnnnnnnnnnnnnnnnnnnnnnnnnnnnnnnnnnnnnnnnnnnnnnnnnnnnnnnnnnnnnnnnnnnnnnnnnnnnnnnnnnnnnnnnnnnnnnnnnnnnnnnnnnnnnnnnnnnnnnnnnnnnnnnnnnnnnnnnnnnnnnnnnnnnnnnnnnnnnnnnnnnnnnnnnnnnnnnnnnnnnnnnnnnnnnnnnnnnnnnnnnnnnnnnnnnnnnnnnnnnnnnnnnnnnnnnnnnnnnnnnnnnnnnnnnnnnnnnnnnnnnnnnnnnnnnnnnnnnnnnnnnnnnnnnnnnnnnnnnnnnnnnnnnnnnnnnnnnnnnnnnnnnnnnnnnnnnnnnnnnnnnnnnnnnnnnnnnnnnnnnnnnnnnnnnnnnnnnnnnnnnnnnnnnnnnnnnnnnnnnnnnnnnnnnnnnnnnnnnnnnnnnnnnnnnnnnnnnnnnnnnnnnnnnnnnnnnnnnnnnnnnnnnnnnnnnnnnnnnnnnnnnnnnnnnnnnnnnnnnnnnnnnnnnnnnnnnnnnnnnnnnnnnnnnnnnnnnnnnnnnnnnnnnnnnnnnnnnnnnnnnnnnnnnnnnnnnnnnnnnnnnnnnnnnnnnnnnnnnnnnnnnnnnnnnnnnnnnnnnnnnnnnnnnnnnnnnnnnnnnnnnnnnnnnnnnnnnnnnnnnnnnnnnnnnnnnnnnnnnnnnnnnnnnnnnnnnnnnnnnnnnnnnnnnnnnnnnnnnnnnnnnnnnnnnnnnnnnnnnnnnnnnnnnnnnnnnnnnnnnnnnnnnnnnnnnnnnnnnnnnnnnnnnnnnnnnnnnnnnnnnnnnnnnnnnnnnnnnnnnnnnnnnnnnnnnnnnnnnnnnnnnnnnnnnnnnnnnnnnnnnnnnnnnnnnnnnnnnnnnnnnnnnnnnnnnnnnnnnnnnnnnnnnnnnnnnnnnnnnnnnnnnnnnnnnnnnnnnnnnnnnnnnnnnnnnnnnnnnnnnnnnnnnnnnnnnnnnnnnnnnnnnnnnnnnnnnnnnnnnnnnnnnnnnnnnnnnnnnnnnnnnnnnnnnnnnnnnnnnnnnnnnnnnnnnnnnnnnnnnnnnnnnnnnnnnnnnnnnnnnnnnnnnnnnnnnnnnnnnnnnnnnnnnnnnnnnnnnnnnnnnnnnnnnnnnnnnnnnnnnnnnnnnnnnnnnnnnnnnnnnnnnnnnnnnnnnnnnnnnnnnnnnnnnnnnnnnnnnnnnnnnnnnnnnnnnnnnnnnnnnnnnnnnnnnnnnnnnnnnnnnnnnnnnnnnnnnnnnnnnnnnnnnnnnnnnnnnnnnnnnnnnnnnnnnnnnnnnnnnnnnnnnnnnnnnnnnnnnnnnnnnnnnnnnnnnnnnnnnnnnnnnnnnnnnnnnnnnnnnnnnnnnnnnnnnnnnnnnnnnnnnnnnnnnnnnnnnnnnnnnnnnnnnnnnnnnnnnnnnnnnnnnnnnnnnnnnnnnnnnnnnnnnnnnnnnnnnnnnnnnnnnnnnnnnnnnnnnnnnnnnnnnnnnnnnnnnnnnnnnnnnnnnnnnnnnnnnnnnnnnnnnnnnnnnnnnnnnnnnnnnnnnnnnnnnnnnnnnnnnnnnnnnnnnnnnnnnnnnnnnnnnnnnnnnnnnnnnnnnnnnnnnnnnnnnnnnnnnnnnnnnnnnnnnnnnnnnnnnnnnnnnnnnnnnnnnnnnnnnnnnnnnnnnnnnnnnnnnnnnnnnnnnnnnnnnnnnnnnnnnnnnnnnnnnnnnnnnnnnnnnnnnnnnnnnnnnnnnnnnnnnnnnnnnnnnnnnnnnnnnnnnnnnnnnnnnnnnnnnnnnnnnnnnnnnnnnnnnnnnnnnnnnnnnnnnnnnnnnnnnnnnnnnnnnnnnnnnnnnnnnnnnnnnnnnnnnnnnnnnnnnnnnnnnnnnnnnnnnnnnnnnnnnnnnnnnnnnnnnnnnnnnnnnnnnnnnnnnnnnnnnnnnnnnnnnnnnnnnnnnnnnnnnnnnnnnnnnnnnnnnnnnnnnnnnnnnnnnnnnnnnnnnnnnnnnnnnnnnnnnnnnnnnnnnnnnnnnnnnnnnnnnnnnnnnnnnnnnnnnnnnnnnnnnnnnnnnnnnnnnnnnnnnnnnnnnnnnnnnnnnnnnnnnnnnnnnnnnnnnnnnnnnnnnnnnnnnnnnnnnnnnnnnnnnnnnnnnnnnnnnnnnnnnnnnnnnnnnnnnnnnnnnnnnnnnnnnnnnnnnnnnnnnnnnnnnnnnnnnnnnnnnnnnnnnnnnnnnnnnnnnnnnnnnnnnnnnnnnnnnnnnnnnnnnnnnnnnnnnnnnnnnnnnnnnnnnnnnnnnnnnnnnnnnnnnnnnnnnnnnnnnnnnnnnnnnnnnnnnnnnnnnnnnnnnnnnnnnnnnnnnnnnnnnnnnnnnnnnnnnnnnnnnnnnnnnnnnnnnnnnnnnnnnnnnnnnnnnnnnnnnnnnnnnnnnnnnnnnnnnnnnnnnnnnnnnnnnnnnnnnnnnnnnnnnnnnnnnnnnnnnnnnnnnnnnnnnnnnnnnnnnnnnnnnnnnnnnnnnnnnnnnnnnnnnnnnnnnnnnnnnnnnnnnnnnnnnnnnnnnnnnnnnnnnnnnnnnnnnnnnnnnnnnnnnnnnnnnnnnnnnnnnnnnnnnnnnnnnnnnnnnnnnnnnnnnnnnnnnnnnnnnnnnnnnnnnnnnnnnnnnnnnnnnnnnnnnnnnnnnnnnnnnnnnnnnnnnnnnnnnnnnnnnnnnnnnnnnnnnnnnnnnnnnnnnnnnnnnnnnnnnnnnnnnnnnnnnnnnnnnnnnnnnnnnnnnnnnnnnnnnnnnnnnnnnnnnnnnnnnnnnnnnnnnnnnnnnnnnnnnnnnnnnnnnnnnnnnnnnnnnnnnnnnnnnnnnnnnnnnnnnnnnnnnnnnnnnnnnnnnnnnnnnnnnnnnnnnnnnnnnnnnnnnnnnnnnnnnnnnnnnnnnnnnnnnnnnnnnnnnnnnnnnnnnnnnnnnnnnnnnnnnnnnnnnnnnnnnnnnnnnnnnnnnnnnnnnnnnnnnnnnnnnnnnnnnnnnnnnnnnnnnnnnnnnnnnnnnnnnnnnnnnnnnnnnnnnnnnnnnnnnnnnnnnnnnnnnnnnnnnnnnnnnnnnnnnnnnnnnnnnnnnnnnnnnnnnnnnnnnnnnnnnnnnnnnnnnnnnnnnnnnnnnnnnnnnnnnnnnnnnnnnnnnnnnnnnnnnnnnnnnnnnnnnnnnnnnnnnnnnnnnnnnnnnnnnnnnnnnnnnnnnnnnnnnnnnnnnnnnnnnnnnnnnnnnnnnnnnnnnnnnnnnnnnnnnnnnnnnnnnnnnnnnnnnnnnnnnnnnnnnnnnnnnnnnnnnnnnnnnnnnnnnnnnnnnnnnnnnnnnnnnnnnnnnnnnnnnnnnnnnnnnnnnnnnnnnnnnnnnnnnnnnnnnnnnnnnnnnnnnnnnnnnnnnnnnnnnnnnnnnnnnnnnnnnnnnnnnnnnnnnnnnnnnnnnnnnnnnnnnnnnnnnnnnnnnnnnnnnnnnnnnnnnnnnnnnnnnnnnnnnnnnnnnnnnnnnnnnnnnnnnnnnnnnnnnnnnnnnnnnnnnnnnnnnnnnnnnnnnnnnnnnnnnnnnnnnnnnnnnnnnnnnnnnnnnnnnnnnnnnnnnnnnnnnnnnnnnnnnnnnnnnnnnnnnnnnnnnnnnnnnnnnnnnnnnnnnnnnnnnnnnnnnnnnnnnnnnnnnnnnnnnnnnnnnnnnnnnnnnnnnnnnnnnnnnnnnnnnnnnnnnnnnnnnnnnnnnnnnnnnnnnnnnnnnnnnnnnnnnnnnnnnnnnnnnnnnnnnnnnnnnnnnnnnnnnnnnnnnnnnnnnnnnnnnnnnnnnnnnnnnnnnnnnnnnnnnnnnnnnnnnnnnnnnnnnnnnnnnnnnnnnnnnnnnnnnnnnnnnnnnnnnnnnnnnnnnnnnnnnnnnnnnnnnnnnnnnnnnnnnnnnnnnnnnnnnnnnnnnnnnnnnnnnnnnnnnnnnnnnnnnnnnnnnnnnnnnnnnnnnnnnnnnnnnnnnnnnnnnnnnnnnnnnnnnnnnnnnnnnnnnnnnnnnnnnnnnnnnnnnnnnnnnnnnnnnnnnnnnnnnnnnnnnnnnnnnnnnnnnnnnnnnnnnnnnnnnnnnnnnnnnnnnnnnnnnnnnnnnnnnnnnnnnnnnnnnnnnnnnnnnnnnnnnnnnnnnnnnnnnnnnnnnnnnnnnnnnnnnnnnnnnnnnnnnnnnnnnnnnnnnnnnnnnnnnnnnnnnnnnnnnnnnnnnnnnnnnnnnnnnnnnnnnnnnnnnnnnnnnnnnnnnnnnnnnnnnnnnnnnnnnnnnnnnnnnnnnnnnnnnnnnnnnnnnnnnnnnnnnnnnnnnnnnnnnnnnnnnnnnnnnnnnnnnnnnnnnnnnnnnnnnnnnnnnnnnnnnnnnnnnnnnnnnnnnnnnnnnnnnnnnnnnnnnnnnnnnnnnnnnnnnnnnnnnnnnnnnnnnnnnnnnnnnnnnnnnnnnnnnnnnnnnnnnnnnnnnnnnnnnnnnnnnnnnnnnnnnnnnnnnnnnnnnnnnnnnnnnnnnnnnnnnnnnnnnnnnnnnnnnnnnnnnnnnnnnnnnnnnnnnnnnnnnnnnnnnnnnnnnnnnnnnnnnnnnnnnnnnnnnnnnnnnnnnnnnnnnnnnnnnnnnnnnnnnnnnnnnnnnnnnnnnnnnnnnnnnnnnnnnnnnnnnnnnnnnnnnnnnnnnnnnnnnnnnnnnnnnnnnnnnnnnnnnnnnnnnnnnnnnnnnnnnnnnnnnnnnnnnnnnnnnnnnnnnnnnnnnnnnnnnnnnnnnnnnnnnnnnnnnnnnnnnnnnnnnnnnnnnnnnnnnnnnnnnnnnnnnnnnnnnnnnnnnnnnnnnnnnnnnnnnnnnnnnnnnnnnnnnnnnnnnnnnnnnnnnnnnnnnnnnnnnnnnnnnnnnnnnnnnnnnnnnnnnnnnnnnnnnnnnnnnnnnnnnnnnnnnnnnnnnnnnnnnnnnnnnnnnnnnnnnnnnnnnnnnnnnnnnnnnnnnnnnnnnnnnnnnnnnnnnnnnnnnnnnnnnnnnnnnnnnnnnnnnnnnnnnnnnnnnnnnnnnnnnnnnnnnnnnnnnnnnnnnnnnnnnnnnnnnnnnnnnnnnnnnnnnnnnnnnnnnnnnnnnnnnnnnnnnnnnnnnnnnnnnnnnnnnnnnnnnnnnnnnnnnnnnnnnnnnnnnnnnnnnnnnnnnnnnnnnnnnnnnnnnnnnnnnnnnnnnnnnnnnnnnnnnnnnnnnnnnnnnnnnnnnnnnnnnnnnnnnnnnnnnnnnnnnnnnnnnnnnnnnnnnnnnnnnnnnnnnnnnnnnnnnnnnnnnnnnnnnnnnnnnnnnnnnnnnnnnnnnnnnnnnnnnnnnnnnnnnnnnnnnnnnnnnnnnnnnnnnnnnnnnnnnnnnnnnnnnnnnnnnnnnnnnnnnnnnnnnnnnnnnnnnnnnnnnnnnnnnnnnnnnnnnnnnnnnnnnnnnnnnnnnnnnnnnnnnnnnnnnnnnnnnnnnnnnnnnnnnnnnnnnnnnnnnnnnnnnnnnnnnnnnnnnnnnnnnnnnnnnnnnnnnnnnnnnnnnnnnnnnnnnnnnnnnnnnnnnnnnnnnnnnnnnnnnnnnnnnnnnnnnnnnnnnnnnnnnnnnnnnnnnnnnnnnnnnnnnnnnnnnnnnnnnnnnnnnnnnnnnnnnnnnnnnnnnnnnnnnnnnnnnnnnnnnnnnnnnnnnnnnnnnnnnnnnnnnnnnnnnnnnnnnnnnnnnnnnnnnnnnnnnnnnnnnnnnnnnnnnnnnnnnnnnnnnnnnnnnnnnnnnnnnnnnnnnnnnnnnnnnnnnnnnnnnnnnnnnnnnnnnnnnnnnnnnnnnnnnnnnnnnnnnnnnnnnnnnnnnnnnnnnnnnnnnnnnnnnnnnnnnnnnnnnnnnnnnnnnnnnnnnnnnnnaaagggattctcaaaatgagtgggtttgaggtgaaagagaggatggattcaagctccaaaggtgatttccatcacaaaacaagcttaaggaagggatttgggtgaggaatggtgaagaaatggagcttgggtgctcaacaatggaggtaggaggtctgaggaagaagaaggagaagttggggctccaaaaatcgcgaaatgggctttatatagggggtctgcccgtgctgcggcgcctccggtgccggcccccacgcccagggcgccaccttccagaacccacggcgcctccagcgccgacactggcgccaagagcgccagcctccagtacctctggcgccaagagcgccatctccgcgcctcaggcgccaacttccagaacctctggcgccaaccgcgccacctcccgcgccaagggcgcccacttccagagacacccgcgccacaggcgccagctcccgcgcctcaggcgccaacatccagaacatctggcgccaaccgtgccacccacggcgccaagggcgcctgctgggaaaatcagggtggttctggcgccaccggcgccgacctggcgcccagagcgccaaccaccagaggccatggcgcctggagcgccgctcccgcgcctccggcgccacaaaccagcactgcggcgcctggagcgccatcctggcgcctggagcgccagaattatgcagaagaattctgcagaattcttggccagacgcttcccgattcgcgccatacgcgtcctaattcgcgccaaacgcgctgggacttaggaatattacagttctagaccgttcaaacgaaagggaactatcattctctctataaccacataacaaatcactgtgcaagtgattatctgatcctcaacaggatccctctcagcctacacaaggctacagagtctcaacacaagctctgatcaactatggccaagcatatctctgcttacaatggcctaaaatctgacccctcataatggtcagtttcaaccgatcaaactcacctatatagtctcatgagcaactttgtcaactgctctaaggttcagactagtcaaatagtcgaccttttccatctgcacatatacagactcagagccaaactcaaacttcatcagtaatgatgattcaaggctctaaacccctcagaaccatcctctgagcataagactccacagagtccgagcctaacaactgctctaacacctccaaaaacacccctcaagataaccccaaaaccccgaaatccaaaacatagaaccaacggttagagctcgagtttcttacctctgtggcgttcaaaaacaccagggaatagcttttcctaagatgatccgcctaatcacggcctcttttgctttcaaactccgagctcccaagggttctctcagggaaatccaatctcactaatcctcaccttttctcaagaatcaatcggggtatcttacttatctcgaggttctaatcattttctcagttggttgggaggtgtttagatgaactatggagaagatacgaagcttaaccgctcatcaatggaggttccctcttttctctctgctttttctctttcctcttcaaccctaagtgaccttttataaaagcaaannnnnnnnnnnnnnnnnnnnnnnnnnnnnnnnnnnnnnnnnnnnnnnnnnnnnnnnnnnnnnnnnnnnnnnnnnnnnnnnnnnnnnnnnnnnnnnnnnnnnnnnnnnnnnnnnnnnnnnnnnnnnnnnnnnnnnnnnnnnnnnnnnnnnnnnnnnnnnnnnnnnnnnnnnnnnnnnnnnnnnnnnnnnnnnnnnnnnnnnnnnnnnnnnnnnnnnnnnnnnnnnnnnnnnnnnnnnnnnnnnnnnnnnnnnnnnnnnnnnnnnnnnnnnnnnnnnnnnnnnnnnnnnnnnnnnnnnnnnnnnnnnnnnnnnnnnnnnnnnnnnnnnnnnnnnnnnnnnnnnnnnnnnnnnnnnnnnnnnnnnnnnnnnnnnnnnnnnnnnnnnnnnnnnnnnnnnnnnnnnnnnnnnnnnnnnnnnnnnnnnnnnnnnnnnnnnnnnnnnnnnnnnnnnnnnnnnnnnnnnnnnnnnnnnnnnnnnnnnnnnnnnnnnnnnnnnnnnnnnnnnnnnnnnnnnnnnnnnnnnnnnnnnnnnnnnnnnnnnnnnnnnnnnnnnnnnnnnnnnnnnnnnnnnnnnnnnnnnnnnnnnnnnnnnnnnnnnnnnnnnnnnnnnnnnnnnnnnnnnnnnnnnnnnnnnnnnnnnnnnnnnnnnnnnnnnnnnnnnnnnnnnnnnnnnnnnnnnnnnnnnnnnnnnnnnnnnnnnnnnnnnnnnnnnnnnnnnnnnnnnnnnnnnnnnnnnnnnnnnnnnnnnnnnnnnnnnnnnnnnnnnnnnnnnnnnnnnnnnnnnnnnnnnnnnnnnnnnnnnnnnnnnnnnnnnnnnnnnnnnnnnnnnnnnnnnnnnnnnnnnnnnnnnnnnnnnnnnnnnnnnnnnnnnnnnnnnnnnnnnnnnnnnnnnnnnnnnnnnnnnnnnnnnnnnnnnnnnnnnnnnnnnnnnnnnnnnnnnnnnnnnnnnnnnnnnnnnnnnnnnnnnnnnnnnnnnnnnnnnnnnnnnnnnnnnnnnnnnnnnnnnnnnnnnnnnnnnnnnnnnnnnnnnnnnnnnnnnnnnnnnnnnnnnnnnnnnnnnnnnnnnnnnnnnnnnnnnnnnnnnnnnnnnnnnnnnnnnnnnnnnnnnnnnnnnnnnnnnnnnnnnnnnnnnnnnnnnnnnnnnnnnnnnnnnnnnnnnnnnnnnnnnnnnnnnnnnnnnnnnnnnnnnnnnnnnnnnnnnnnnnnnnnnnnnnnnnnnnnnnnnnnnnnnnnnnnnnnnnnnnnnnnnnnnnnnnnnnnnnnnnnnnnnnnnnatataattccataacatagataattagataccaaataagttcaatttataggattcacttggattacaaacttatatttaaaatatttgaattttttaaaaataataaatacatgtacttaggacgtacttcaaagctaaaaaaaacttatgaattgatcattgcttgtatacatctttattatttaaatataatttgggttattgcttgatcaatttttgacttattattacttattatttaaaataattaaaaagatgtttgcatatattttagttgataaataattattttaactagaataggtataaagggtctaactgtaaagttgtaaagcttactttttttttttttttaataactatcacccggccacacaatccctcaccctccacagtctccattcccctctgtgtacctcacccctctacctttgtgcagcgcaacacctcacactccacctcctcacggcgcactccccgttcgcaacgcagcacaaaatccctccgcaaatctcaacattcatatttcatttttattttttatttgttcttgaatttattattttgtcatttgatatgtttattttcttgtttttcaactgtgatcaattgctctgagagtagtccttgtcatagcgtgatttgattctacaagagccatggccacaagggttactctgagagtagtttgcgggaattaaagggttactctgacaaccatgagcatgagttgatgaagaaggtgaatgggagaaagacatgataaattcttgttgtttattgtttgatctggattttttagttcacggcgcactccccgttcgcaacgcagcacaatgccattgttgtttattgtttgatctggattttttagttcattctcctcttcatgttcttcctttttcatttatattgttaccctgtacagtctgtcaggaatgaattcttctaattacggtgtttatgtacgagggactgatggtcaacaagaatctgatttttatggaatgttgtctgatattattcaattggagtatactggcatcccattgatgaagttaattctattcaagtgtgattggtttgataatactccttatatagggacacgagtagataaaaagtatgagattgttgaagtaaagcaatcaaaaagatatactaaggcatatgacccattcatatttgcacaacaagctgaacaagtttattacacaacatatcctgaaggacatcgaggatggttagccataatgaagacaaaagctcgcaacaaaatcattgacaatatagtgagtgaaactgagcaagaggctccataccaagatgatgagcttgtagggcttcaacaagtgttggaagttgatcctgatgtcattaatgaatctcttgtggatgttgatggaggtggagaagagatagatgcagatttacttagacaactagacttggttgaaccagacgaggatgaatgcacattaagtgagaatgagatcgaaagtgattttgatgatacagatacttcttaggtagttcatacattaaagttgatggtatgcattatgttcattgtatatctatcagtaatatattgatatttgtatgactgtggtttgtaataattattacttttactcttgtaatggacatgaaagagaagataactgacctattttgacgtagaaaacatgtttatgtgagttttcattaacaagttagaattgtttgtttactaaagtgtattgtttgtgatacttcactttttatttatttgttgttaaatatcatatatgtgtgtgtgtgtgtgtgtgtgtctgtatgtaacaaactcaaacatgtagatggcagatagaggtagaggtaatggtcgcagaacatttataaattgtggtagaagacggggtgttagtttggaagctccaattaccaccaacccttccatctcttccattcacatatcaacttcagagtcaatgattaatgttactacaccgataccaaacatacttcctacagctcaagaccaaccaaatccagcctttgtaagggagtcaattcccactacccctgttggagatgcttcaccttcagcaccagatcattctcttacacctgagtacccacctgatccaaatggtgaacatagtactgatgagaggcctttcattcgtgcatataaaggagagtaagtacattttattaaactatgaatttttctttaaatgtttttaaatgtggtattgacaatgtctttgtacataggtttcaaccaacatatggatgttctaataccatatcaaatatcattagggcaaagtttgatgaaccagctgcaagttggttgaaggtatcaattgaccttcgtgataggtggtttggagagtttaaggtaattttaattctagtttaatttaaaatggattgtttatactatcatttgtaattcagttcttgtttcgtatcttatacagaaatattataggtggtacccagcagaagaacgggccattagaactgtttttgagacaaaaggttcacgcattttgaaaagtgcaatgaacaagatcagaaatggtaaagataaaggaaattggataacatccaatgttcgagcagccttggatgaacattggggttcttcagatttccaaaacaagagctccactgccaaggcaaatcgatctgttgataggggagcctcagcatattgtggtggttccatatcaactgcagctcactttgaaaagatggtaatttcactatatatatatatcattgattttaattaaatgcaaataattaaaatgtttgcaattttaactttttaactttacgtagtcaaaggagttgcaaagatcaccaactgcttgggaggtgatggagaaaactaagaaattaaagtcgggagaatgggtcaatgataagtcccgtgaatttgctgtaagttattttttctaattatatcactttatttgatatattgtggttgatattataaatgaactctaattatatctcttgaacttatttacatttcttgattttgttttcttttactactgttaaatgtttgtgattcgctagtattaactttgaagcttactatagtagattgaagtcaattttttttctatattagtggtgattttcttgaatattaattcttatatggctatgcatacatctatttatctttatatctcactttatattgcaggagaaatatcaacaacgtcgaaatgaaatcttacaacattcggcagaagaaggcacatctacaagggattcccctgacacgactacttctgttgatgataatgaaatatatttgaatgttgttggaggtctcaattacaaggggaatgtgtatgggctaggtactttgagcaaaaggtttagttgctcaaaattagctccatctacttctattactcatgtggaagaccaaatagaggaaatgcgtgagacaattactaaattgaatgttgagcttatggcaaaggtagataaggagaaaacacttgaggaaaagatgttgcagctggtggagagtcacgaccatcaaagccaagagatgagacggcagatgcaagagcaacgtgagcaaattcgtcaacaaaatgagcaaatgcagcgcatattacaacacttgcagattcagtctatcataccagctcctagtccatcaactaccacagcagatggaactgagcaccatgttgatgatgctcaggttaatctttctcatgacatgtcaaaggaccattgacatgaagctataatttatttgagtttgattatgtcatgttagctatacatttgaacttcattaaactttgctatttcgttttgttaaactttgaaaaatttgaatttgcaccttatcaatatttaaattagaattgttattagatatatttacatattatcattgtccagttttatttatcagtttgattatataatttgttaaacttatatttatcaccaatacttattaagcaggtcaaaatttaaaacatttaaaaataaaaattaaacattttgatttagcgaccgaatttgtgacggaaacaaactaaatagcaaccgaattagcgactgaaatgtatttttcatttacaaattaaatattaaatagccaccgaattagtgaccgaaaaagatattactttaaatattatttaataattagcgaccgaattagccaccgaagaaaattgattataaaattatttatttaatagcgacggagttagcgaccgaatattaaatttcatttattttaaaattaaaatttatattaaatattagcaaccgaattagcgacttcggcgttcggttgccaatttggttacaatcgaaaatagtaaccaaactgatagcgaccgaatttatgtaatttgcgacaaattgtgtcaattgctaatctgcgaccgaaacagaattcagtgactaaagatttagcgactagggtttttgcgacgcaaatttttcggtcgctatttcggttgctaactgttttagcgactgaattcaatgatttagcgacggatttgttcggtcgctaaaacctgttttttttgtagtgttccatgaactaagaaaatagtcctgcatcatatgacctgcataagtataaatgcaatattaattagttgtgataatgaaaaaatacatgatctgtacaattaacagttctaaataacaagagttggaaataacaaaatctaatataacaaatagttaactactaatcatattcaaaaacaggaaaactataatattacctaaaacaggaaataacagaatctaatctaattaacaatggctacataacgtttattagaagagagcatgaacaaggttgactatggatgacgacaatttgggttggggctttctattctcagaggactaggtggtggtgtcttccattagagtgatgatggcaatatatagtgaaatggatgacattgacatcatacaataattggtttgttcgcaagaaaaggagtgagtggagactgttcgcatgaggcagagaactagaaagaagatgagaagagcttccagttatggagattgttacgagatgaatggagtgtacctgctgtcaccgttgcaaagcttgaaaaccttccagatatggagattaatgttactggaggtgaagacgagaatatgaaagctccactatgaatgagaagagaaaggcatgcagcgcagtgcaaaacaaaggtcactgcttcaactaaagtaacactataaactttatttggacctttttggattaaaaagaaataaatggatcagattaaggaattattctttagacttattcttgcatgtaattggatctcttgttatatatatatatatatatatatatatatatattttttttttnnnnnnnnnnnnnnnnnnnnnnnnnnnnnnnnnnnnnnnnnnnnnnnnnnnnnnnnnnnnnnnnnnnnnnnnnnnnnnnnnnnnnnnnnnnnnnnnnnnnnnnnnnnnnnnnnnnnnnnnnnnnnnnnnnnnnnnnnnnnnnnnnnnnnnnnnnnnnnnnnnnnnnnnnnnnnnnnnnnnnnnnnnnnnnnnnnnnnnnnnnnnnnnnnnnnnnnnnnnnnnnnnnnnnnnnnnnnnnnnnnnnnnnnnnnnnnnnnnnnnnnnnnnnnnnnnnnnnnnnnnnnnnnnnnnnnnnnnnnnnnnnnnnnnnnnnnnnnnnnnnnnnnnnnnnnnnnnnnnnnnnnnnnnnnnnnnnnnnnnnnnnnnnnnnnnnnnnnnnnnnnnnnnnnnnnnnnnnnnnnnnnnnnnnnnnnnnnnnnnnnnnnnnnnnnnnnnnnnnnnnnnnnnnnnnnnnnnnnnnnnnnnnnnnnnnnnnnnnnnnnnnnnnnnnnnnnnnnnnnnnnnnnnnnnnnnnnnnnnnnnnnnnnnnnnnnnnnnnnnnnnnnnnnnnnnnnnnnnnnnnnnnnnnnnnnnnnnnnnnnnnnnnnnnnnnnnnnnnnnnnnnnnnnnnnnnnnnnnnnnnnnnnnnnnnnnnnnnnnnnnnnnnnnnnnnnnnnnnnnnnnnnnnnnnnnnnnnnnnnnnnnnnnnnnnnnnnnnnnnnnnnnnnnnnnnnnnnnnnnnnnnnnnnnnnnnnnnnnnnnnnnnnnnnnnnnnnnnnnnnnnnnnnnnnnnnnnnnnnnnnnnnnnnnnnnnnnnnnnnnnnnnnnnnnnnnnnnnnnnnnnnnnnnnnnnnnnnnnnnnnnnnnnnnnnnnnnnnnnnnnnnnnnnnnnnnnnnnnnnnnnnnnnnnnnnnnnnnnnnnnnnnnnnnnnnnnnnnnnnnnnnnnnnnnnnnnnnnnnnnnnnnnnnnnnnnnnnnnnnnnnnnnnnnnnnnnnnnnnnnnnnnnnnnnnnnnnnnnnnnnnnnnnnnnnnnnnnnnnnnnnnnnnnnnnnnnnnnnnnnnnnnnnnnnnnnnnnnnnnnnnnnnnnnnnnnnnnnnnnnnnnnnnnnnnnnnnnnnnnnnnnnnnnnnnnnnnnnnnnnnnnnnnnnnnnnnnnnnnnnnnnnnnnnnnnnnnnnnnnnnnnnnnnnnnnnnnnnnnnnnnnnnnnnnnnnnnnnnnnnnnnnnnnnnnnnnnnnnnnnnnnnnnnnnnnnnnnnnnnnnnnnnnnnnnnnnnnnnnnnnnnnnnnnnnnnnnnnnnnnnnnnnnnnnnnnnnnnnnnnnnnnnnnnnnnnnnnnnnnnnnnnnnnnnnnnnnnnnnnnnnnnnnnnnnnnnnnnnnnnnnnnnnnnnnnnnnnnnnnnnnnnnnnnnnnnnnnnnnnnnnnnnnnnnnnnnnnnnnnnnnnnnnnnnnnnnnnnnnnnnnnnnnnnnnnnnnnnnnnnnnnnnnnnnnnnnnnnnnnnnnnnnnnnnnnnnnnnnnnnnnnnnnnnnnnnnnnnnnnnnnnnnnnnnnnnnnnnnnnnnnnnnnnnnnnnnnnnnnnnnnnnnnnnnnnnnnnnnnnnnnnnnnnnnnnnnntttatatatatatatatatatatatatatatatattttttttttatgaagatgaatcaatttacattataaataactctaaaatgttactctttatctttactatttattttcttaaaatttagtaactgtaatcgctaaatttttttaaaaaaaatggtaaggatagaaattaattttcttagaattattcttgtaatttgatcttttcttttcctctatccaatgattataaatcactccatagtttaaaatgtattaaaaaagataatcgatctataatataactattgcccccacaaattaaattttttggattcgtcactattgttggacgcaagtttagattgcaaaatggatcttcttttaattttttttatatatcctcaacaacatggatcttctttatcatgatttgaatttcaacttcattgattttgttcttgttttcattttggtgataatctggacggtacgattgtgttgcatgttatgtatgcaacttgctacactatatgcttcctagagatagggagatagagagagaaggaggagtggttgttgaagagagtgacaccaacgacaataacaatagcaacaacggtgtgacatcattttcgaagaaggctcggatcaggtgcttcgccgcttactcggatgctgcggaatagataatgaatgataacaatgcaggattcaatagtgcgcggggaatgaagaaaagcagaggggagtgggagtgaggaaaaataggcataaaaatgaaaaggttataagaggaaaaataggcataaaaatgaaagggtataaaaagaaaaaatgagaaaaaagaagtgcaaattacaacctttatacttggtttggtagaagagaaagtgtgagaaaagaaaatagagactaaaaagaacaacattaatgaaatattttttctgtttgtttggaaagaaaaaaaatattttttagatacaaaatttaaattttttctttatctcattttttttcaatttaaattttaaaattttctttccttctttatttttctttcatccaacaaacatagcattaatctttgactttaaagtgtaacatgaaattattctattattagaagtgtaacatagattactcaaaaatactcacgagtaattacttagctagactaaaaaatcataataaaagagatcatgacttttaaaaagatattaaaaaaatataaagatacgaaaagtcgtttacgggaactcatgccaatgccaccaagtgtaatgaagataagcaaaccaaccaaagaataagaacccaagggcttaggcggaagagcagcagaggaagtcatatttggtgaaactgagataatcactggaggttctggggacttgcaacaagttacacaaataccaagacaggttattagtatcaacaaaatatggacatggattcacgctagtgacttttccatgcattcacacattcaatgcaattataattaattattaaatgaaccatcaaggttcaacatcgttggtaaatagttaaattccttaaacatgctggcagggatttgattcccgaccatgcatatcaagtaaaaaaagccacttttttggaagaggtaaaatttacaaagatgcatgttttaacaagtctattttactgaaaattttatccaatagtcatttactggttctgattgcatgaatacatgaagagtgattatagcaatctggatcctcagcaatattatttccttttagtatggacttataagacattgtgtttttatgagttgtttaatttgaattttatgcttagtatggggcaaaagaaccaaaagggtgtttttttaaaaaatatttaccgataaggtgcgcttt
